(19) United States
(12) Patent Application Publication
(10) Pub. No.: US 2008/0305959 A1
(43) Pub. Date: Dec. 11, 2008

(54) Laser microdissection and microarray analysis of breast tumors reveal estrogen receptor related genes and pathways

(76) Inventors: Yixin Wang, San Diego, CA (US); Jack X. Yu, San Diego, CA (US); Yugiu Jiang, San Diego, CA (US); Fei Yang, San Diego, CA (US)

Correspondence Address: PHILIP S. JOHNSON;JOHNSON & JOHNSON, ONE JOHNSON & JOHNSON PLAZA, NEW BRUNSWICK, NJ, 08933-7003, US

(21) Appl. No.: 11/398,340

(22) Filed: Apr. 4, 2006

Related U.S. Application Data
(60) Provisional application No. 60/668,005, filed on Apr. 4, 2005.

(51) Int. Cl. C40B 30/04; C12Q 1/68; C07H 21/04; C40B 40/08

(52) U.S. Cl. 506/9; 435/6; 536/24.31; 506/17

(57) ABSTRACT

About 70% to 80% of breast cancers express estrogen receptor-α (ERα), and estrogens play important roles in the development and growth of hormone-dependent tumors. Together with lymph node metastasis, tumor size and histological grade, ER status is considered one of the prognostic factors in breast cancer, and an indicator for hormonal treatment. 147 genes and 112 genes with significant P-value and having significant differential expression between ER+ and ER− tumors were identified from the LCM data set and bulk tissue data set, respectively. 61 genes were found to be common in both data sets, while 85 genes were unique to the LCM data set and 51 genes were present only in the bulk tumor data set. Pathway analysis with the 85 genes using Gene Ontology suggested that genes involved in endocytosis, ceramide generation, Ras/ERK/Ark cascade, and JAT-STAT pathway may play roles related to ER. The gene profiling with LCM-captured tumor cells provides a unique approach to characterize and study epithelial tumor cells and to gain an insight into signaling pathways associated with ER.

### STATEMENT REGARDING FEDERALLY SPONSORED RESEARCH OR DEVELOPMENT

[0001] No government funds were used to make this invention.

### REFERENCE TO SEQUENCE LISTING, OR A COMPUTER PROGRAM LISTING COMPACT DISK APPENDIX

[0002] Reference to a “Sequence Listing,” appendix is specified.

### BACKGROUND OF THE INVENTION

[0003] About 70% to 80% of breast cancers express estrogen receptor-α (ERα), and estrogens play important roles in the development and growth of hormone-dependent tumors. Together with lymph node metastasis, tumor size and histological grade, ER status is considered one of the prognostic factors in breast cancer, and an indicator for hormonal treatment. Breast cancer is the most frequently diagnosed cancer and the second leading cause of cancer death among women in the US. Estrogens play important roles in the growth and differentiation of normal mammary gland, as well as in the development and progression of breast carcinoma. Estrogens regulate gene expression via ERα, which is expressed in about 70% to 80% of all breast cancers. Parl (2000). In current clinical practice, the presence of ER is a marker for selecting hormonal or aromatase inhibitors treatment in patients with primary or recurred breast cancers. Mokbel (2003). Extensive studies have described that ERs are ligand-activated transcription factors that mediate the pleiotropic effects of the steroid hormone estrogen on the growth, development and maintenance of several target tissues. Moggs et al. (2001). Mechanisms by which estrogen receptor mediates the transactivation of gene expression are complex. Hall et al. (2001) summarized the following four pathways: 1) classical ligand-dependent pathway in which the ER complex regulates gene transcription through its interaction with ERE consensus DNA sequences; 2) ligand-independent pathway in which growth factors and their tyrosine kinase receptors may activate ER and increase the expression of ER target genes in the absence of estrogen; 3) DNA binding-independent pathway in which induction of gene regulation by ER complex is through interactions with no ERE-like promoter elements such as AP1, SP1 and CREs; and 4) cell-surface (nongenomic) signaling in which estrogen activates a putative membrane-associated binding site that generate rapid tissue responses. However, the details of the estrogen effect on downstream gene targets, the role of cofactors, and cross talk between other signaling pathways are still largely unknown.

[0004] Gene-expression profiling technologies have empowered researchers to address complex questions in tumor biology. Many studies have shown the distinct patterns of gene expression related to ER status in breast cancer, and identified genes related to ER signaling. WO 2004/079014; West et al. (2001); Gruvberger et al. (2001); and Sotiriou et al. (2003). However, most data were based on expression of mRNAs isolated from tumor masses, which constitute various cell populations such as stroma cells, fibroblasts and lymphocytes, in addition to cancer cells. Moreover, the proportion of tumor cells in clinical samples varies significantly. These issues may compromise the gene expression data associated with ER that is expressed specifically on the epithelial cells. Laser capture microdissection (LCM) (Emmert-Buck et al. 1996), a technique that procures histologically homogenous cell populations, has recently been successfully used in combination with DNA microarray technologies in studies of various types of tumors (Luo et al. 1999; Matsui et al. 2003; Yim et al. 2003; and Nakamura et al. 2004), including breast cancer for which genes were identified in association with tumor progression and metastasis. Ma et al. (2002); Seth et al. (2003); and Nishidate et al. (2004).

### SUMMARY OF THE INVENTION

[0005] The present invention provides a method of determining estrogen receptor expression status by obtaining a bulk tissue tumor sample from a breast cancer patient; and measuring the expression levels in the sample of genes encoding mRNA: i. corresponding to SEQ ID Nos listed in Table 2 or 3; or ii. recognized by the probe sets psids corresponding to SEQ ID Nos listed in Table 2 or 3 where the gene expression levels above or below pre-determined cut-off levels are indicative of estrogen receptor expression status.

[0006] The present invention provides a method of determining estrogen receptor expression status by obtaining a microscopically isolated tumor sample from a breast cancer patient; and measuring the expression levels in the sample of genes those encoding mRNA: i. corresponding to SEQ ID Nos listed in Table 2 or 4; or ii. recognized by the probe sets psids corresponding to SEQ ID Nos listed in Table 2 or 4 where the gene expression levels above or below pre-determined cut-off levels are indicative of estrogen receptor expression status.

[0007] The present invention provides a method of determining breast cancer patient treatment protocol by obtaining a bulk tissue tumor sample from a breast cancer patient; and measuring the expression levels in the sample of genes those encoding mRNA: i. corresponding to SEQ ID Nos listed in Table 2 or 3; or ii. recognized by the probe sets psids corresponding to SEQ ID Nos listed in Table 2 or 3 where the gene expression levels above or below pre-determined cut-off levels are sufficiently indicative of risk of recurrence to enable a physician to determine the degree and type of therapy recommended to prevent recurrence.

[0008] The present invention provides a method of determining breast cancer patient treatment protocol by obtaining a microscopically isolated tumor sample from a breast cancer patient; and measuring the expression levels in the sample of genes those encoding mRNA: i. corresponding to SEQ ID Nos listed in Table 2 or 4; or ii. recognized by the probe sets psids corresponding to SEQ ID Nos listed in Table 2 or 4 where the gene expression levels above or below pre-determined cut-off levels are sufficiently indicative of risk of recurrence to enable a physician to determine the degree and type of therapy recommended to prevent recurrence.

[0009] The present invention provides a method of treating a breast cancer patient by obtaining a bulk tissue tumor sample from a breast cancer patient; and measuring the expression levels in the sample of genes those encoding mRNA: i. corresponding to SEQ ID Nos listed in Table 2 or 3; or ii. recognized by the probe sets psids corresponding to SEQ ID Nos listed in Table 2 or 3 and; treating the patient with adjuvant therapy if they are a high risk patient.

[0010] The present invention provides a method of treating a breast cancer patient by obtaining a microscopically isolated tumor sample from a breast cancer patient; and measuring the expression levels in the sample of genes those encoding mRNA: i. corresponding to SEQ ID Nos listed in Table 2 or 4; or ii. recognized by the probe sets psids corresponding to SEQ ID Nos listed in Table 2 or 4 and; treating the patient with adjuvant therapy if they are a high risk patient.

[0011] The present invention provides a composition comprising at least one probe set the SEQ ID NOs: listed in Table 2, 3 and/or 4.

[0012] The present invention provides a kit for conducting an assay to determine estrogen receptor expression status a biological sample comprising: materials for detecting isolated nucleic acid sequences, their complements, or portions thereof of a combination of genes those encoding mRNA corresponding to the SEQ ID NOs: listed in Table 2, 3 and/or 4.

[0013] The present invention provides articles for assessing breast cancer status comprising: materials for detecting isolated nucleic acid sequences, their complements, or portions thereof of a combination of genes those encoding mRNA corresponding to the SEQ ID NOs: listed in Table 2, 3 and/or 4.

[0014] The present invention provides a microarray or gene chip for performing the method of any one of the methods described herein.

[0015] The present invention provides a diagnostic/prognostic portfolio comprising isolated nucleic acid sequences, their complements, or portions thereof of a combination of genes those encoding mRNA corresponding to the SEQ ID NOs: listed in Table 2, 3 and/or 4.

### BRIEF DESCRIPTION OF THE DRAWINGS

[0016] FIG. 1 depicts the comparison of expression intensities of 21 consecutively expressed housekeeping genes between the bulk tumor data set and the LCM-procured sample data set.

[0017] FIG. 2 depicts unsupervised two-dimensional hierarchical clustering analysis of the global gene expression data using Gene Spring software. A filter was applied to include genes that had “present” calls in at least two samples. Each horizontal row represents a gene, and each vertical column corresponds to a sample. Red or green color indicates a transcription level above or below the median expression of the genes across all samples. Blue bars represent the LCM sample data and yellow bars represent the bulk tumor data. ER status of the patients determined by ligand binding assay was represented as darker green blocks for ER+ patients and light green blocks for ER− patients. Bars A, B, C and D represent major sub-groups within the LCM and bulk tissue clusters.

[0018] FIG. 3 depicts pathway analyses of differentially expressed genes between ER+ subgroup and ER− subgroup. The categories that had at least 10 genes on the chip were used for following pathway analyses. A list of genes that were selected from data analysis was mapped to the GO Biological Process categories. Then hypergeometric distribution probability of the genes was calculated for each category. The categories that had a p-value less than 0.05 and at least two genes were considered over-represented in the selected gene list. 3A represents the pie chart of the number of genes designated to the three following categories: common in both LCM data set and bulk tumor data set; unique to the LCM sample data set; unique to the bulk tumor data set. 3B listed pathways that were identified with the common gene list, 3C shows the significant pathways with genes that are unique to the LCM data set, and 3D represents the pathways that are unique to the bulk tumor data set. P-values are specified beside bars.

### DETAILED DESCRIPTION

[0019] To investigate genes and pathways that are associated with ER status and epithelial cells in breast tumors, we applied laser capture microdissection (LCM) technology to capture epithelial tumor cells from 28 lymph node negative breast tumor samples, in which 17 patients had ER+ tumors, and 11 patients had ER− tumors. Gene expression profiles were analyzed on Affymetrix Hu133A GeneChips. Meanwhile, gene profiles using total RNA isolated from bulk tumors of the same 28 patients were also generated. 146 genes and 112 genes with significant P-value and having significant differential expression between ER+ and ER− tumors were identified from the LCM data set and bulk tissue data set, respectively. 61 genes were found to be common in both data sets, while 85 genes were unique to the LCM data set and 51 genes were present only in the bulk tumor data set. Pathway analysis with the 85 genes using Gene Ontology suggested that genes involved in endocytosis, ceramide generation, Ras/ERK/Ark cascade, and JAT-STAT pathway may play roles related to ER. The gene profiling with LCM-captured tumor cells provides a unique approach to study epithelial tumor cells and to gain an insight into signaling pathways associated with ER.

[0020] The present invention provides a method of determining estrogen receptor expression status by obtaining a bulk tissue tumor sample from a breast cancer patient; and measuring the expression levels in the sample of genes encoding mRNA: i. corresponding to SEQ ID Nos listed in Table 2 or 3; or ii. recognized by the probe sets psids corresponding to SEQ ID Nos listed in Table 2 or 3 where the gene expression levels above or below pre-determined cut-off levels are indicative of estrogen receptor expression status.

[0021] The sample can be obtained from a primary tumor such as from a biopsy or a surgical specimen. The method can further include measuring the expression level of at least one gene constitutively expressed in the sample. In one embodiment, the method yields a result where the specificity is at least about 40% and the sensitivity is at least at least about 90%. In another embodiment, the expression pattern of the genes is compared to an expression pattern indicative of a relapse patient. The comparison of expression patterns can be conducted with pattern recognition methods such as a Cox's proportional hazards analysis.

[0022] In one embodiment, the pre-determined cut-off levels are at least 1.5-fold over- or under-expression in the sample relative to benign cells or normal tissue. In another embodiment, the pre-determined cut-off levels have at least a statistically significant p-value over- or under-expression in the sample having metastatic cells relative to benign cells or normal tissue. Preferably, the p-value is less than 0.05.

[0023] In one embodiment, gene expression is measured on a microarray or gene chip such as a cDNA array or an oligonucleotide array. The microarray or gene chip can further contain one or more internal control reagents. In one embodiment, gene expression is determined by nucleic acid amplification conducted by polymerase chain reaction (PCR) of RNA extracted from the sample. PCR can be by reverse transcription polymerase chain reaction (RT-PCR) and can contain one or more internal control reagents. In one embodiment, gene expression is detected by measuring or detecting a protein encoded by the gene such as by an antibody specific to the protein. In one embodiment, gene expression is detected by measuring a characteristic of the gene such as DNA amplification, methylation, mutation and allelic variation.

[0024] The present invention provides a method of determining estrogen receptor expression status by obtaining a microscopically isolated tumor sample from a breast cancer patient; and measuring the expression levels in the sample of genes those encoding mRNA: i. corresponding to SEQ ID Nos listed in Table 2 or 4; or ii. recognized by the probe sets psids corresponding to SEQ ID Nos listed in Table 2 or 4 where the gene expression levels above or below pre-determined cut-off levels are indicative of estrogen receptor expression status.

[0025] The sample can be obtained from a primary tumor. The microscopic isolation can be, for instance, by laser capture microdissection. The method can further include measuring the expression level of at least one gene constitutively expressed in the sample. In one embodiment, the method yields a result where the specificity is at least about 40% and the sensitivity is at least at least about 90%. In another embodiment, the expression pattern of the genes is compared to an expression pattern indicative of a relapse patient. The comparison of expression patterns can be conducted with pattern recognition methods such as a Cox's proportional hazards analysis.

[0026] In one embodiment, the pre-determined cut-off levels are at least 1.5-fold over- or under-expression in the sample relative to benign cells or normal tissue. In another embodiment, the pre-determined cut-off-levels have at least a statistically significant p-value over- or under-expression in the sample having metastatic cells relative to benign cells or normal tissue. Preferably, the p-value is less than 0.05.

[0027] In one embodiment, gene expression is measured on a microarray or gene chip such as a cDNA array or an oligonucleotide array. The microarray or gene chip can further contain one or more internal control reagents. In one embodiment, gene expression is determined by nucleic acid amplification conducted by polymerase chain reaction (PCR) of RNA extracted from the sample. PCR can be by reverse transcription polymerase chain reaction (RT-PCR) and can contain one or more internal control reagents. In one embodiment, gene expression is detected by measuring or detecting a protein encoded by the gene such as by an antibody specific to the protein. In one embodiment, gene expression is detected by measuring a characteristic of the gene such as DNA amplification, methylation, mutation and allelic variation.

[0028] The present invention provides a method of determining breast cancer patient treatment protocol by obtaining a bulk tissue tumor sample from a breast cancer patient; and measuring the expression levels in the sample of genes those encoding mRNA: i. corresponding to SEQ ID Nos listed in Table 2 or 3; or ii. recognized by the probe sets psids corresponding to SEQ ID Nos listed in Table 2 or 3 where the gene expression levels above or below pre-determined cut-off levels are sufficiently indicative of risk of recurrence to enable a physician to determine the degree and type of therapy recommended to prevent recurrence.

[0029] The sample can be obtained from a primary tumor such as from a biopsy or a surgical specimen. The method can further include measuring the expression level of at least one gene constitutively expressed in the sample. In one embodiment, the method yields a result where the specificity is at least about 40% and the sensitivity is at least at least about 90%. In another embodiment, the expression pattern of the genes is compared to an expression pattern indicative of a relapse patient. The comparison of expression patterns can be conducted with pattern recognition methods such as a Cox's proportional hazards analysis.

[0030] In one embodiment, the pre-determined cut-off levels are at least 1.5-fold over- or under-expression in the sample relative to benign cells or normal tissue. In another embodiment, the pre-determined cut-off levels have at least a statistically significant p-value over- or under-expression in the sample having metastatic cells relative to benign cells or normal tissue. Preferably, the p-value is less than 0.05.

[0031] In one embodiment, gene expression is measured on a microarray or gene chip such as a cDNA array or an oligonucleotide array. The microarray or gene chip can further contain one or more internal control reagents. In one embodiment, gene expression is determined by nucleic acid amplification conducted by polymerase chain reaction (PCR) of RNA extracted from the sample. PCR can be by reverse transcription polymerase chain reaction (RT-PCR) and can contain one or more internal control reagents. In one embodiment, gene expression is detected by measuring or detecting a protein encoded by the gene such as by an antibody specific to the protein. In one embodiment, gene expression is detected by measuring a characteristic of the gene such as DNA amplification, methylation, mutation and allelic variation.

[0032] The present invention provides a method of determining breast cancer patient treatment protocol by obtaining a microscopically isolated tumor sample from a breast cancer patient; and measuring the expression levels in the sample of genes those encoding mRNA: i. corresponding to SEQ ID Nos listed in Table 2 or 4; or ii. recognized by the probe sets psids corresponding to SEQ ID Nos listed in Table 2 or 4 where the gene expression levels above or below pre-determined cut-off levels are sufficiently indicative of risk of recurrence to enable a physician to determine the degree and type of therapy recommended to prevent recurrence.

[0033] The sample can be obtained from a primary tumor. The microscopic isolation can be, for instance, by laser capture microdissection. The method can further include measuring the expression level of at least one gene constitutively expressed in the sample. In one embodiment, the method yields a result where the specificity is at least about 40% and the sensitivity is at least at least about 90%. In another embodiment, the expression pattern of the genes is compared to an expression pattern indicative of a relapse patient. The comparison of expression patterns can be conducted with pattern recognition methods such as a Cox's proportional hazards analysis.

[0034] In one embodiment, the pre-determined cut-off levels are at least 1.5-fold over- or under-expression in the sample relative to benign cells or normal tissue. In another embodiment, the pre-determined cut-off levels have at least a statistically significant p-value over- or under-expression in the sample having metastatic cells relative to benign cells or normal tissue. Preferably, the p-value is less than 0.05.

[0035] In one embodiment, gene expression is measured on a microarray or gene chip such as a cDNA array or an oligonucleotide array. The microarray or gene chip can further contain one or more internal control reagents. In one embodiment, gene expression is determined by nucleic acid amplification conducted by polymerase chain reaction (PCR) of RNA extracted from the sample. PCR can be by reverse transcription polymerase chain reaction (RT-PCR) and can contain one or more internal control reagents. In one embodiment, gene expression is detected by measuring or detecting a protein encoded by the gene such as by an antibody specific to the protein. In one embodiment, gene expression is detected by measuring a characteristic of the gene such as DNA amplification, methylation, mutation and allelic variation.

[0036] The present invention provides a method of treating a breast cancer patient by obtaining a bulk tissue tumor sample from a breast cancer patient; and measuring the expression levels in the sample of genes those encoding mRNA: i. corresponding to SEQ ID Nos listed in Table 2 or 3; or ii. recognized by the probe sets psids corresponding to SEQ ID Nos listed in Table 2 or 3 and; treating the patient with adjuvant therapy if they are a high risk patient.

[0037] The sample can be obtained from a primary tumor such as from a biopsy or a surgical specimen. The method can further include measuring the expression level of at least one gene constitutively expressed in the sample. In one embodiment, the method yields a result where the specificity is at least about 40% and the sensitivity is at least at least about 90%. In another embodiment, the expression pattern of the genes is compared to an expression pattern indicative of a relapse patient. The comparison of expression patterns can be conducted with pattern recognition methods such as a Cox's proportional hazards analysis.

[0038] In one embodiment, the pre-determined cut-off levels are at least 1.5-fold over- or under-expression in the sample relative to benign cells or normal tissue. In another embodiment, the pre-determined cut-off levels have at least a statistically significant p-value over- or under-expression in the sample having metastatic cells relative to benign cells or normal tissue. Preferably, the p-value is less than 0.05.

[0039] In one embodiment, gene expression is measured on a microarray or gene chip such as a cDNA array or an oligonucleotide array. The microarray or gene chip can further contain one or more internal control reagents. In one embodiment, gene expression is determined by nucleic acid amplification conducted by polymerase chain reaction (PCR) of RNA extracted from the sample. PCR can be by reverse transcription polymerase chain reaction (RT-PCR) and can contain one or more internal control reagents. In one embodiment, gene expression is detected by measuring or detecting a protein encoded by the gene such as by an antibody specific to the protein. In one embodiment, gene expression is detected by measuring a characteristic of the gene such as DNA amplification, methylation, mutation and allelic variation.

[0040] The present invention provides a method of treating a breast cancer patient by obtaining a microscopically isolated tumor sample from a breast cancer patient; and measuring the expression levels in the sample of genes those encoding mRNA: i. corresponding to SEQ ID Nos listed in Table 2 or 4; or ii. recognized by the probe sets psids corresponding to SEQ ID Nos listed in Table 2 or 4 and; treating the patient with adjuvant therapy if they are a high risk patient.

[0041] The sample can be obtained from a primary tumor. The microscopic isolation can be, for instance, by laser capture microdissection. The method can further include measuring the expression level of at least one gene constitutively expressed in the sample. In one embodiment, the method yields a result where the specificity is at least about 40% and the sensitivity is at least at least about 90%. In another embodiment, the expression pattern of the genes is compared to an expression pattern indicative of a relapse patient. The comparison of expression patterns can be conducted with pattern recognition methods such as a Cox's proportional hazards analysis.

[0042] In one embodiment, the pre-determined cut-off levels are at least 1.5-fold over- or under-expression in the sample relative to benign cells or normal tissue. In another embodiment, the pre-determined cut-off levels have at least a statistically significant p-value over- or under-expression in the sample having metastatic cells relative to benign cells or normal tissue. Preferably, the p-value is less than 0.05.

[0043] In one embodiment, gene expression is measured on a microarray or gene chip such as a cDNA array or an oligonucleotide array. The microarray or gene chip can further contain one or more internal control reagents. In one embodiment, gene expression is determined by nucleic acid amplification conducted by polymerase chain reaction (PCR) of RNA extracted from the sample. PCR can be by reverse transcription polymerase chain reaction (RT-PCR) and can contain one or more internal control reagents. In one embodiment, gene expression is detected by measuring or detecting a protein encoded by the gene such as by an antibody specific to the protein. In one embodiment, gene expression is detected by measuring a characteristic of the gene such as DNA amplification, methylation, mutation and allelic variation.

[0044] The present invention provides a composition comprising at least one probe set the SEQ ID NOs: listed in Table 2, 3 and/or 4 such as a kit, article, microarray, etc.

[0045] The present invention provides a kit for conducting an assay to determine estrogen receptor expression status a biological sample comprising: materials for detecting isolated nucleic acid sequences, their complements, or portions thereof of a combination of genes those encoding mRNA corresponding to the SEQ ID NOs: listed in Table 2, 3 and/or 4. In one embodiment, the SEQ ID NOs. are those in Table 2 and/or 3. In another embodiment, the SEQ ID NOs. are listed in Table 2 and/or 4. The kit can further contain reagents for conducting a microarray analysis such as a medium through which said nucleic acid sequences, their complements, or portions thereof are assayed.

[0046] The present invention provides articles for assessing breast cancer status comprising: materials for detecting isolated nucleic acid sequences, their complements, or portions thereof of a combination of genes those encoding mRNA corresponding to the SEQ ID NOs: listed in Table 2, 3 and/or 4. In one embodiment, the SEQ ID NOs. are those in Table 2 and/or 3. In another embodiment, the SEQ ID NOs. are listed in Table 2 and/or 4. The articles can further contain reagents for conducting a microarray analysis such as a medium through which said nucleic acid sequences, their complements, or portions thereof are assayed.

[0047] The present invention provides a microarray or gene chip for performing the method of any one of the methods described herein. The microarray can contain isolated nucleic acid sequences, their complements, or portions thereof of a combination of genes those encoding mRNA corresponding to the SEQ ID NOs: listed in Table 2, 3 and/or 4. The microarray can further contain a cDNA array or an oligonucleotide array. The microarray can further contain or more internal control reagents.

[0048] The present invention provides a diagnostic/prognostic portfolio comprising isolated nucleic acid sequences, their complements, or portions thereof of a combination of genes those encoding mRNA corresponding to the SEQ ID NOs: listed in Table 2, 3 and/or 4.

[0049] Gene expression profiling using microscopically isolated breast tumor cells has not only identified differentially expressed genes related to ER status, but provides new information regarding pathways associated with estrogen signaling. The elucidation of the functional and clinical significance of these genes is also useful in determining breast tumor development by correlating expression levels of the identified genes with tumor progression or stage. The identification of breast epithelia specific genes further provides advantages in drug discovery for breast cancers by monitoring expression levels of the identified genes in tissue or in vitro expression systems in response to the presence or a drug or other substance.

[0050] The mere presence or absence of particular nucleic acid sequences in a tissue sample has only rarely been found to have diagnostic or prognostic value. Information about the expression of various proteins, peptides or mRNA, on the other hand, is increasingly viewed as important. The mere presence of nucleic acid sequences having the potential to express proteins, peptides, or mRNA (such sequences referred to as “genes”) within the genome by itself is not determinative of whether a protein, peptide, or mRNA is expressed in a given cell. Whether or not a given gene capable of expressing proteins, peptides, or mRNA does so and to what extent such expression occurs, if at all, is determined by a variety of complex factors. Irrespective of difficulties in understanding and assessing these factors, assaying gene expression can provide useful information about the occurrence of important events such as tumorogenesis, metastasis, apoptosis, and other clinically relevant phenomena. Relative indications of the degree to which genes are active or inactive can be found in gene expression profiles. The gene expression profiles of this invention are used to provide a prognosis and treat patients for breast cancer.

[0051] Sample preparation requires the collection of patient samples. Patient samples used in the inventive method are those that are suspected of containing diseased cells such as epithelial cells taken from the primary tumor in a breast sample. Samples taken from surgical margins are also preferred. Most preferably, however, the sample is taken from a lymph node obtained from a breast cancer surgery. Laser Capture Microdissection (LCM) technology is one way to select the cells to be studied, minimizing variability caused by cell type heterogeneity. Consequently, moderate or small changes in gene expression between normal and cancerous cells can be readily detected. Samples can also comprise circulating epithelial cells extracted from peripheral blood. These can be obtained according to a number of methods but the most preferred method is the magnetic separation technique described in U.S. Pat. No. 6,136,182. Once the sample containing the cells of interest has been obtained, RNA is extracted and amplified and a gene expression profile is obtained, preferably via micro-array, for genes in the appropriate portfolios.

[0052] Preferred methods for establishing gene expression profiles include determining the amount of RNA that is produced by a gene that can code for a protein or peptide. This is accomplished by RT-PCR, competitive RT-PCR, real time RT-PCR, differential display RT-PCR, Northern Blot analysis and other related tests. While it is possible to conduct these techniques using individual PCR reactions, it is best to amplify complementary DNA (cDNA) or complementary RNA (cRNA) produced from mRNA and analyze it via microarray. A number of different array configurations and methods for their production are known to those of skill in the art and are described in U.S. patents such as: U.S. Pat. Nos. 5,445,934; 5,532,128; 5,556,752; 5,242,974; 5,384,261; 5,405,783; 5,412,087; 5,424,186; 5,429,807; 5,436,327; 5,472,672; 5,527,681; 5,529,756; 5,545,531; 5,554,501; 5,561,071; 5,571,639; 5,593,839; 5,599,695; 5,624,711; 5,658,734; and 5,700,637.

[0053] Microarray technology allows for the measurement of the steady-state mRNA level of thousands of genes simultaneously thereby presenting a powerful tool for identifying effects such as the onset, arrest, or modulation of uncontrolled cell proliferation. Two microarray technologies are currently in wide use. The first are cDNA arrays and the second are oligonucleotide arrays. Although differences exist in the construction of these chips, essentially all downstream data analysis and output are the same. The product of these analyses are typically measurements of the intensity of the signal received from a labeled probe used to detect a cDNA sequence from the sample that hybridizes to a nucleic acid sequence at a known location on the microarray. Typically, the intensity of the signal is proportional to the quantity of cDNA, and thus mRNA, expressed in the sample cells. A large number of such techniques are available and useful. Preferred methods for determining gene expression can be found in U.S. Pat. Nos. 6,004,755; 6,218,114; 6,218,122; and 6,271,002.

[0054] Analysis of expression levels is conducted by comparing signal intensities. This is best done by generating a ratio matrix of the expression intensities of genes in a test sample versus those in a control sample. For instance, the gene expression intensities from a diseased tissue can be compared with the expression intensities generated from normal tissue of the same type (e.g., diseased breast tissue sample vs. normal breast tissue sample). A ratio of these expression intensities indicates the fold-change in gene expression between the test and control samples.

[0055] Gene expression profiles can also be displayed in a number of ways. The most common method is to arrange raw fluorescence intensities or ratio matrix into a graphical Dendogram where columns indicate test samples and rows indicate genes. The data are arranged so genes that have similar expression profiles are proximal to each other. The expression ratio for each gene is visualized as a color. For example, a ratio less than one (indicating down-regulation) may appear in the blue portion of the spectrum while a ratio greater than one (indicating up-regulation) may appear as a color in the red portion of the spectrum. Commercially available computer software programs are available to display such data including GeneSpring from Agilent Technologies and Partek Discover™ and Partek Infer™ software from Partek®.

[0056] Modulated genes used in the methods of the invention are described in the Examples. Differentially expressed genes are either up- or down-regulated in patients with a relapse of breast cancer relative to those without a relapse. Up regulation and down regulation are relative terms meaning that a detectable difference (beyond the contribution of noise in the system used to measure it) is found in the amount of expression of the genes relative to some baseline. In this case, the baseline is the measured gene expression of a non-relapsing patient. The genes of interest in the diseased cells (from the relapsing patients) are then either up- or down-regulated relative to the baseline level using the same measurement method. Diseased, in this context, refers to an alteration of the state of a body that interrupts or disturbs, or has the potential to disturb, proper performance of bodily functions as occurs with the uncontrolled proliferation of cells. Someone is diagnosed with a disease when some aspect of that person's genotype or phenotype is consistent with the presence of the disease. However, the act of conducting a diagnosis or prognosis includes the determination of disease/status issues such as determining the likelihood of relapse and therapy monitoring. In therapy monitoring, clinical judgments are made regarding the effect of a given course of therapy by comparing the expression of genes over time to determine whether the gene expression profiles have changed or are changing to patterns more consistent with normal tissue.

[0057] Preferably, levels of up- and down-regulation are distinguished based on fold changes of the intensity measurements of hybridized microarray probes. A 2.0 fold difference is preferred for making such distinctions (or a p-value less than 0.05). That is, before a gene is said to be differentially expressed in diseased/relapsing versus normal/non-relapsing cells, the diseased cell is found to yield at least 2 times more, or 2 times less intensity than the normal cells. The greater the fold difference, the more preferred is use of the gene as a diagnostic or prognostic tool. Genes selected for the gene expression profiles of the instant invention have expression levels that result in the generation of a signal that is distinguishable from those of the normal or non-modulated genes by an amount that exceeds background using clinical laboratory instrumentation.

[0058] Statistical values can be used to confidently distinguish modulated from non-modulated genes and noise. Statistical tests find the genes most significantly different between diverse groups of samples. The Student's T-test is an example of a robust statistical test that can be used to find significant differences between two groups. The lower the p-value, the more compelling the evidence that the gene is showing a difference between the different groups. Nevertheless, since microarrays measure more than one gene at a time, tens of thousands of statistical tests may be performed at one time. Because of this, one is unlikely to see small p-values just by chance and adjustments for this using a Sidak correction as well as a randomization/permutation experiment can be made. A p-value less than 0.05 by the T-test is evidence that the gene is significantly different. More compelling evidence is a p-value less then 0.05 after the Sidak correction is factored in. For a large number of samples in each group, a p-value less than 0.05 after the randomization/permutation test is the most compelling evidence of a significant difference.

[0059] Another parameter that can be used to select genes that generate a signal that is greater than that of the non-modulated gene or noise is the use of a measurement of absolute signal difference. Preferably, the signal generated by the modulated gene expression is at least 20% different than those of the normal or non-modulated gene (on an absolute basis). It is even more preferred that such genes produce expression patterns that are at least 30% different than those of normal or non-modulated genes.

[0060] Genes can be grouped so that information obtained about the set of genes in the group provides a sound basis for making a clinically relevant judgment such as a diagnosis, prognosis, or treatment choice. These sets of genes make up the portfolios of the invention. In this case, the judgments supported by the portfolios involve breast cancer and its chance of recurrence. As with most diagnostic markers, it is often desirable to use the fewest number of markers sufficient to make a correct medical judgment. This prevents a delay in treatment pending further analysis as well inappropriate use of time and resources.

[0061] Preferably, portfolios are established such that the combination of genes in the portfolio exhibit improved sensitivity and specificity relative to individual genes or randomly selected combinations of genes. In the context of the instant invention, the sensitivity of the portfolio can be reflected in the fold differences exhibited by a gene's expression in the diseased state relative to the normal state. Specificity can be reflected in statistical measurements of the correlation of the signaling of gene expression with the condition of interest. For example, standard deviation can be a used as such a measurement. In considering a group of genes for inclusion in a portfolio, a small standard deviation in expression measurements correlates with greater specificity. Other measurements of variation such as correlation coefficients can also be used.

[0062] One method of establishing gene expression portfolios is through the use of optimization algorithms such as the mean variance algorithm widely used in establishing stock portfolios. This method is described in detail in US patent publication number 20030194734. Essentially, the method calls for the establishment of a set of inputs (stocks in financial applications, expression as measured by intensity here) that will optimize the return (e.g., signal that is generated) one receives for using it while minimizing the variability of the return. Many commercial software programs are available to conduct such operations. “Wagner Associates Mean-Variance Optimization Application,” referred to as “Wagner Software” throughout this specification, is preferred. This software uses functions from the “Wagner Associates Mean-Variance Optimization Library” to determine an efficient frontier and optimal portfolios in the Markowitz sense is preferred. Use of this type of software requires that microarray data be transformed so that it can be treated as an input in the way stock return and risk measurements are used when the software is used for its intended financial analysis purposes.

[0063] The process of selecting a portfolio can also include the application of heuristic rules. Preferably, such rules are formulated based on biology and an understanding of the technology used to produce clinical results. More preferably, they are applied to output from the optimization method. For example, the mean variance method of portfolio selection can be applied to microarray data for a number of genes differentially expressed in subjects with breast cancer. Output from the method would be an optimized set of genes that could include some genes that are expressed in peripheral blood as well as in diseased tissue. If samples used in the testing method are obtained from peripheral blood and certain genes differentially expressed in instances of breast cancer are differentially expressed in peripheral blood, then a heuristic rule can be applied in which a portfolio is selected from the efficient frontier excluding those that are differentially expressed in peripheral blood. Of course, the rule can be applied prior to the formation of the efficient frontier by, for example, applying the rule during data pre-selection.

[0064] Other heuristic rules can be applied that are not necessarily related to the biology in question. For example, one can apply a rule that only a prescribed percentage of the portfolio can be represented by a particular gene or group of genes. Commercially available software such as the Wagner Software readily accommodates these types of heuristics. This can be useful, for example, when factors other than accuracy and precision (e.g., anticipated licensing fees) have an impact on the desirability of including one or more genes.

[0065] One method of the invention involves comparing gene expression profiles for various genes (or portfolios) to ascribe prognoses. The gene expression profiles of each of the genes comprising the portfolio are fixed in a medium such as a computer readable medium. This can take a number of forms. For example, a table can be established into which the range of signals (e.g., intensity measurements) indicative of disease is input. Actual patient data can then be compared to the values in the table to determine whether the patient samples are normal or diseased. In a more sophisticated embodiment, patterns of the expression signals (e.g., fluorescent intensity) are recorded digitally or graphically.

[0066] The gene expression patterns from the gene portfolios used in conjunction with patient samples are then compared to the expression patterns. Pattern comparison software can then be used to determine whether the patient samples have a pattern indicative of recurrence of the disease. Of course, these comparisons can also be used to determine whether the patient is not likely to experience disease recurrence. The expression profiles of the samples are then compared to the portfolio of a control cell. If the sample expression patterns are consistent with the expression pattern for recurrence of a breast cancer then (in the absence of countervailing medical considerations) the patient is treated as one would treat a relapse patient. If the sample expression patterns are consistent with the expression pattern from the normal/control cell then the patient is diagnosed negative for breast cancer.

[0067] In this invention, the most preferred method for analyzing the gene expression pattern of a patient to determine prognosis of breast cancer is through the use of a Cox's hazard analysis program. Most preferably, the analysis is conducted using S-Plus software (commercially available from Insightful Corporation). Using such methods, a gene expression profile is compared to that of a profile that confidently represents relapse (i.e., expression levels for the combination of genes in the profile is indicative of relapse). The Cox's hazard model with the established threshold is used to compare the similarity of the two profiles (known relapse versus patient). and then determines whether the patient profile exceeds the threshold. If it does, then the patient is classified as one who will relapse and is accorded treatment such as adjuvant therapy. If the patient profile does not exceed the threshold then they are classified as a non-relapsing patient. Other analytical tools can also be used to answer the same question such as, linear discriminate analysis, logistic regression and neural network approaches.

[0068] Numerous other well-known methods of pattern recognition are available. The following references provide some examples: Weighted Voting: Golub et al. (1999); Support Vector Machines: Su et al. (2001); and Ramaswamy et al. (2001); K-nearest Neighbors: Ramaswamy (2001); and Correlation Coefficients: van't Veer et al. (2002).

[0069] The gene expression profiles of this invention can also be used in conjunction with other non-genetic diagnostic methods useful in cancer diagnosis, prognosis, or treatment monitoring. For example, in some circumstances it is beneficial to combine the diagnostic power of the gene expression based methods described above with data from conventional markers such as serum protein markers (e.g., Cancer Antigen 27.29 (“CA 27.29”)). A range of such markers exists including such analytes as CA 27.29. In one such method, blood is periodically taken from a treated patient and then subjected to an enzyme immunoassay for one of the serum markers described above. When the concentration of the marker suggests the return of tumors or failure of therapy, a sample source amenable to gene expression analysis is taken. Where a suspicious mass exists, a fine needle aspirate (FNA) is taken and gene expression profiles of cells taken from the mass are then analyzed as described above. Alternatively, tissue samples may be taken from areas adjacent to the tissue from which a tumor was previously removed. This approach can be particularly useful when other testing produces ambiguous results.

[0070] Articles of this invention include representations of the gene expression profiles useful for treating, diagnosing, prognosticating, and otherwise assessing diseases. These profile representations are reduced to a medium that can be automatically read by a machine such as computer readable media (magnetic, optical, and the like). The articles can also include instructions for assessing the gene expression profiles in such media. For example, the articles may comprise a CD ROM having computer instructions for comparing gene expression profiles of the portfolios of genes described above. The articles may also have gene expression profiles digitally recorded therein so that they may be compared with gene expression data from patient samples. Alternatively, the profiles can be recorded in different representational format. A graphical recordation is one such format. Clustering algorithms such as those incorporated in Partek Discover™ and Partek Infer™ software from Partek® mentioned above can best assist in the visualization of such data.

[0071] Different types of articles of manufacture according to the invention are media or formatted assays used to reveal gene expression profiles. These can comprise, for example, microarrays in which sequence complements or probes are affixed to a matrix to which the sequences indicative of the genes of interest combine creating a readable determinant of their presence. Alternatively, articles according to the invention can be fashioned into reagent kits for conducting hybridization, amplification, and signal generation indicative of the level of expression of the genes of interest for detecting breast cancer.

[0072] Kits made according to the invention include formatted assays for determining the gene expression profiles. These can include all or some of the materials needed to conduct the assays such as reagents and instructions.

[0073] SEQ ID NOs: 1-197 are summarized in Table 5. In each SEQ ID NO: 1-197, the marker is identified by a psid or Affymetrix Proset ID represents the gene encoding any variant, allele etc. corresponding to the given SEQ ID NO. The marker is also defined as the gene encoding mRNA recognized by the probe corresponding to the given psid.

[0074] The following examples are provided to illustrate but not limit the claimed invention. All references cited herein are hereby incorporated herein by reference. Genes analyzed according to this invention are typically related to full-length nucleic acid sequences that code for the production of a protein or peptide. One skilled in the art will recognize that identification of full-length sequences is not necessary from an analytical point of view. That is, portions of the sequences or ESTs can be selected according to well-known principles for which probes can be designed to assess gene expression for the corresponding gene.

### EXAMPLE 1

### Comparison of Expression Intensities of 21 Consecutively Expressed Housekeeping Genes Between the Bulk Tumor Data Set and the LCM-Procured Sample Data Set

[0075] In order to gain insights into the mechanisms trigged by estrogen in breast epithelia cells, we applied LCM technique to a set of 28 early stage primary breast tumors that consisted of 17 ER+ and 11 ER− tumors. We then analyzed their gene expression profiles using Affymetrix GeneChip Hu133A.

[0076] Breast tumors used in this study were selected from the Erasmus Medical Center tumor bank, Rotterdam, Netherlands. These samples were submitted to the laboratory for routine assessment of steroid hormone receptor status, and stored since in liquid nitrogen. The present study in which coded tumor tissues were used was performed according to the Code of Conduct of the Federation of Medical Scientific Societies in the Netherlands. The study was approved by the institutional Medical Ethical Committee of the Erasmus Medical Center. Patients were diagnosed as stage I and IIa between 1983 and 1994, with a median age of 49 years (range: 29-74 years). These breast tumors are mostly invasive ductal carcinoma (IDC) with a fraction of tumors having co-existing ductal carcinoma in situ (DCIS). Table 1 specifies clinical characteristics of these patients. 25 patients had breast-conserving surgery and 3 had mastectomy.

| Characteristic | # of patients (%) |
|---|---|
| Age (yr) | |
| <40 | 2 (7) |
| 40-44 | 5 (17) |
| 45-49 | 8 (27) |
| >=50 | 15 (50) |
| Tumor diameter (mm) | |
| <=20 | 11 (37) |
| >20 | 18 (60) |
| Histologic grade | |
| II (intermediate) | 5 (17) |
| III (poor) | 12 (40) |
| Lymph node metastasis | |
| Negative | 28 (100) |
| Surgery | |
| Breast conserving | 25 (89) |
| Mastectomy | 3 (11) |
| Chemotherapy | |
| No | 28 (100) |
| Hormonal | |
| No | 28 (100) |

[0077] All patients had dissection of the axillary lymph nodes, following by radiotherapy if indicated. No neo-adjuvant treatment had been administered. Tumors were characterized as primary invasive breast carcinoma with size less than 5 cm in diameter (pT1 or pT2). No lymph node metastasis was found at the time of surgery. ER status was determined by ligand-binding assay or enzyme immunoassay as described. Foekens et al. (1989). To classify tumors as ER+ or ER− a cutoff of 10 fmol/mg cytosolic protein was used. To produce the gene expression profiles, an average of 1,000 tumor cells were procured from fresh-frozen sections of the tumor block. A T7-based RNA linear amplification was carried out to obtain sufficient amounts of biotin-labeled aRNA for microarray analysis. Kamme et al. (2004). Using TargetAmp RNA amplification kit (Epicenter, WI) with the biotin-labeling step being substituted with Affymetrix Enzo kit (Affymetrix, CA) in the second round of amplification, in average, 60 μg of aRNA was generated after two rounds of amplification, with a mean size distribution of approximately 2,000 nucleotides. The amplification power was roughly 10⁶-fold from the initial total RNA. Linear regression analysis of the gene expression data derived from the replicates of amplified RNA indicated an R² value of 0.96. The good fidelity and reproducibility of two rounds T7-based RNA linear amplification have been demonstrated in several reports (Luzzi et al. 2003; and Ma et al. 2003), and amplification on the 3′ end of transcripts does not have a major impact on the overall transcript profiles with Affymetrix GeneChip® because the probe sets on the array are designed using 3′ end sequences. Luzzi et al. (2003). Furthermore, the amplification method was shown to enhance sensitivity of identifying the differentially expressed genes as compared to the un-amplified method. Polacek et al. (2003). To ensure that the amplification method in our study accurately preserves mRNA abundance in LCM derived RNA samples, the expression levels of 21 constitutively expressed housekeeping genes were compared between the LCM-procured samples and the bulk tumor samples (FIG. 1). These 21 genes were selected based on a large collection of gene expression profiles from normal, benign, and tumor samples across different tissue types. There is no statistically significant difference between the expression levels of these 21 genes from the two-round amplified LCM samples and their corresponding bulk tumor samples. Therefore, our result agrees with the published studies that two rounds of T7-based RNA amplification accurately preserve the mRNA abundance in the RNA samples, and the combination of LCM and RNA amplification is a reliable approach for gene expression profiling.

[0078] To generate the bulk tumor gene expression data, total RNA samples were extracted using Trizol method (Invitrogen, CA). The targets were then biotin-labeled and hybridized to GeneChip Hu133A according to the manufacturer's manual (Affymetrix, CA). For the LCM-procured sample data set, tumor cells were procured using the PALM® Microlaser system and ZEISS Axiovert 135 (P.A.L.M. Microlaser Technologies, Germany) and an established protocol. Kamme et al. (2004). In brief, embedded frozen tumor specimens were cut as a series of 100 μm thick sections on a Cryocut 1800 Reichert-Jung cryotome (Cambridge Instruments, Germany) at a temperature between −17° C. to −25° C., and were mounted on PEN (polyethylene naphthalate) membrane slides (P.A.L.M. Microlaser Technologies, Germany). Tissue sections were immediately fixed in 100% cold ethanol.

[0079] For H&E staining, slides were sequentially dipped five times in a series of ethanol solutions with decreasing concentrations, 30 seconds in Harris hematoxylin solution (Sigma, St. Louis, Mo.), briefly washed with DI water, five times in Eosin Y (Sigma, St. Louis, Mo.), rinsed with 95% ethanol and 100% ethanol. Slides were ready for LCM procedure after 10 minutes of air drying. For each tumor sample, the first and the last tissue section were mounted on a glass slide and embedded in xylene after H&E staining, which served as the reference and the confirmation for diagnosis. Areas containing tumor cells were then independently isolated from the slides and stored in 100% ethanol. Total RNA from laser-captured cells was extracted with RNeasy buffers (Qiagen, Germany) and recovered using Zymo spin-column (Zymo Research, CA). The RNA samples were then amplified with TargetAmp™ kit with modifications as stated in the text. The final biotin-labeled aRNA product was hybridized to GeneChip Hu133A. For data analysis, the images from the scanned chips were processed using Microarray Analysis Suite 5.0 (Affymetrix Inc., CA). Image data from each microarray was individually scaled to an average intensity of 600. Quality control standards were as follows: RawQ less than 4, background less than 100, scaling factor less than 4, and percentage of “present” call was more than 35%. Blue and yellow bars represent expression levels in the bulk tumors and LCM samples, respectively. Error bars represent the standard deviation across 28 experiments in each data set. P-value was obtained using the T-test. P-value less than 0.01 were considered significantly different between the two data sets. The results are depicted in FIG. 1.

### EXAMPLE 2

### Unsupervised Two-Dimensional Hierarchical Clustering Analysis of the Global Gene Expression Data Using Gene Spring Software

[0080] Gene expression intensities of approximately 23,000 probe sets on Affymetrix UI 33A chip were first normalized using a quantile normalization method, then filtered using “present” call determined by Affymetrix MAS 5.0 software. An unsupervised two-dimensional hierarchical clustering algorithm was applied to the microarray data in order to group genes on the basis of similarities in the expression patterns and to cluster samples on the basis of similarities in the global gene expression profiles. As shown in FIG. 2, 56 samples (28 LCM+28 bulk tissue) were clustered into two major groups according to the source of RNA extraction: LCM-procured tumor cells and mixed cell population from bulk tumors. In each group, the samples were further clustered into two sub-groups (group A and B in LCM samples, group C and D in bulk tissue samples). As we investigated the possible association of clinical parameters to these sub-groups, ER status has the most significant correlation with the classification. In the LCM data set, of 17 tumors diagnosed as ER+, 15 were classified into the same sub-group (group A), and one formed its own subgroup and one being classified into ER− group. 10 out of 11 ER− tumors were classified into sub-group B, with the estimated P-value of X² test being 0.0006. One ER− tumor was clustered with ER+ tumors. As for the bulk tumor data set, the same 15 ER+ samples were classified in the correct category (sub-group C), and the same single ER− sample was clustered with the ER+ group. The two ER+ tumors that were classified into ER− sub-group had very low expression of estrogen receptor in the chip data, while the one ER− tumor that was classified with ER+ subgroup had high expression of ER on the chip. The discrepancy between the routine assessed ER status and the gene expression data may be due to the heterogeneity of tumors or the post-transcriptional regulation of ER expression in these tumors.

### EXAMPLE 3

### Pathway Analyses of Differentially Expressed Genes Between ER+ Subgroup and ER− Subgroup

[0081] To identify genes associated with ER status and its related pathways, we carried out T-test between the ER+ subgroup and the ER− subgroup in each of the two data sets. Using the Bonferroni corrected P-value <0.05 as a cutoff, 175 probe sets representing 146 unique genes were found in the LCM-procured sample data set and 130 probe sets representing 112 unique genes were identified in the bulk tumor data set. By comparing these two gene lists, 61 genes were found to be common, 85 genes were unique to the LCM-procured samples, and 51 genes were only present in the bulk tumor samples (FIG. 3A; Tables 2, 3 and 4). Of the 61 common genes, 36 were relatively over-expressed and 25 were down-regulated in the ER+ subgroup (Table 2). Estrogen receptor together with other genes known to be associated with ER activation, such as trefoil factors 1 & 3, GATA3, X-box binding protein 1 (XBP1), and keratin 18 were among the up-regulated genes. Sotiriou et al. (2003); Gruvberger et al. (2001); and Sun et al. (2005). On the other hand, P-cadherin (CDH3), GABRP, and secreted frizzled-related protein 1 (SFRP1) were present in the down-regulated gene list.

TABLE 2
Common genes in both LCM sample data set and tumor mass data set
with altered expression between ER+ and ER− tumors

| SEQ ID NO | Affymetrix Proset ID | p-value | Relative expression* |
|---|---|---|---|
| 23 | 200670_at | 1.03E−07 | + |
| 33 | 200747_s_at | 3.24E−07 | + |
| 5 | 200811_at | 7.35E−10 | + |
| 40 | 201030_x_at | 5.11E−07 | − |
| 29 | 201596_x_at | 1.92E−07 | + |
| 24 | 201795_at | 1.12E−07 | − |
| 61 | 202035_s_at | 3.13E−06 | − |
| 48 | 202342_s_at | 1.14E−06 | − |
| 58 | 202345_s_at | 2.83E−06 | − |
| 53 | 202554_s_at | 1.67E−06 | + |
| 46 | 202908_at | 9.59E−07 | + |
| 60 | 203256_at | 3.03E−06 | − |
| 34 | 203263_s_at | 3.49E−07 | − |
| 49 | 203453_at | 1.17E−06 | + |
| 13 | 203712_at | 3.09E−08 | − |
| 35 | 203909_at | 3.51E−07 | − |
| 3 | 203928_x_at | 2.45E−10 | + |
| 11 | 204304_s_at | 9.30E−09 | − |
| 8 | 204508_s_at | 4.40E−09 | + |
| 6 | 204623_at | 1.11E−09 | + |
| 43 | 204872_at | 7.34E−07 | − |
| 54 | 204915_s_at | 2.58E−06 | − |
| 14 | 205009_at | 4.34E−08 | + |
| 19 | 205044_at | 7.53E−08 | − |
| 7 | 205225_at | 1.99E−09 | + |
| 59 | 205376_at | 3.00E−06 | + |
| 27 | 205548_s_at | 1.85E−07 | + |
| 51 | 205862_at | 1.24E−06 | + |
| 30 | 206392_s_at | 2.02E−07 | − |
| 15 | 206755_at | 4.71E−08 | + |
| 57 | 206838_at | 2.79E−06 | − |
| 32 | 207828_s_at | 3.22E−07 | − |
| 2 | 208682_s_at | 5.33E−11 | + |
| 39 | 209191_at | 4.94E−07 | − |
| 12 | 209460_at | 9.44E−09 | + |
| 22 | 209602_s_at | 9.40E−08 | + |
| 17 | 209696_at | 5.00E−08 | + |
| 26 | 209791_at | 1.51E−07 | − |
| 9 | 210347_s_at | 4.60E−09 | − |
| 41 | 211712_s_at | 5.15E−07 | + |
| 37 | 212441_at | 4.65E−07 | + |
| 1 | 212494_at | 4.31E−11 | + |
| 55 | 212496_s_at | 2.66E−06 | + |
| 21 | 212638_s_at | 8.19E−08 | + |
| 18 | 212692_s_at | 6.49E−08 | + |
| 38 | 212744_at | 4.72E−07 | + |
| 25 | 212956_at | 1.46E−07 | + |
| 47 | 212985_at | 1.12E−06 | + |
| 42 | 213923_at | 5.43E−07 | − |
| 10 | 214053_at | 7.33E−09 | + |
| 16 | 214440_at | 4.94E−08 | + |
| 20 | 214745_at | 8.03E−08 | − |
| 4 | 216092_s_at | 2.94E−10 | + |
| 52 | 218211_s_at | 1.30E−06 | + |
| 45 | 219197_s_at | 7.64E−07 | + |
| 56 | 220016_at | 2.76E−06 | + |
| 31 | 220230_s_at | 2.98E−07 | − |
| 28 | 220540_at | 1.85E−07 | − |
| 50 | 221203_s_at | 1.20E−06 | − |
| 36 | 221920_s_at | 3.63E−07 | − |
| 44 | 222125_s_at | 7.43E−07 | + |

TABLE 3
Genes unique in bulk tumor data set with altered expression between
ER+ and ER− tumors

| SEQ ID NO | Affymetrix Proset ID | p-value | Relative expression* |
|---|---|---|---|
| 92 | 200719_at | 7.48E−07 | + |
| 66 | 200804_at | 2.13E−08 | + |
| 65 | 201037_at | 1.46E−08 | − |
| 93 | 201754_at | 8.40E−07 | + |
| 100 | 202089_s_at | 1.32E−06 | + |
| 67 | 202897_at | 2.52E−08 | − |
| 62 | 202982_s_at | 2.58E−09 | + |
| 111 | 203287_at | 2.95E−06 | − |
| 110 | 203773_x_at | 2.83E−06 | + |
| 83 | 204284_at | 4.04E−07 | + |
| 73 | 204540_at | 1.60E−07 | + |
| 97 | 204567_s_at | 1.01E−06 | + |
| 90 | 204667_at | 6.42E−07 | + |
| 64 | 204822_at | 1.03E−08 | − |
| 105 | 205081_at | 1.95E−06 | + |
| 63 | 205186_at | 6.07E−09 | + |
| 112 | 206249_at | 2.99E−06 | − |
| 88 | 207571_x_at | 6.14E−07 | − |
| 80 | 208788_at | 3.37E−07 | + |
| 77 | 208873_s_at | 2.82E−07 | + |
| 72 | 209114_at | 1.54E−07 | + |
| 69 | 209122_at | 2.87E−08 | − |
| 103 | 209324_s_at | 1.88E−06 | − |
| 96 | 209870_s_at | 9.47E−07 | − |
| 98 | 210397_at | 1.23E−06 | − |
| 75 | 210845_s_at | 2.22E−07 | − |
| 85 | 211063_s_at | 5.32E−07 | − |
| 74 | 211967_at | 2.12E−07 | − |
| 70 | 212276_at | 4.99E−08 | − |
| 81 | 212501_at | 3.47E−07 | − |
| 76 | 213634_s_at | 2.33E−07 | + |
| 94 | 213651_at | 8.46E−07 | + |
| 101 | 214431_at | 1.37E−06 | − |
| 71 | 215304_at | 8.52E−08 | + |
| 107 | 215329_s_at | 2.27E−06 | + |
| 89 | 216988_s_at | 6.25E−07 | + |
| 108 | 217979_at | 2.28E−06 | + |
| 95 | 218104_at | 8.55E−07 | − |
| 87 | 218195_at | 5.72E−07 | + |
| 106 | 218239_s_at | 2.22E−06 | − |
| 104 | 218532_s_at | 1.92E−06 | + |
| 78 | 218534_s_at | 3.10E−07 | + |
| 91 | 218854_at | 6.51E−07 | − |
| 109 | 218966_at | 2.40E−06 | + |
| 99 | 219615_s_at | 1.25E−06 | − |
| 84 | 219918_s_at | 4.21E−07 | − |
| 79 | 220425_x_at | 3.22E−07 | − |
| 86 | 221834_at | 5.37E−07 | + |
| 68 | 221934_s_at | 2.72E−08 | + |
| 82 | 51158_at | 3.56E−07 | + |
| 102 | 60471_at | 1.46E−06 | − |

TABLE 4
Genes unique in LCM sample data set with altered expression between
ER+ and ER− tumors

| SEQ ID NO | Affymetrix Proset ID | p-value | Relative expression* |
|---|---|---|---|
| 193 | 200790_at | 2.38E−06 | − |
| 113 | 200824_at | 1.08E−09 | − |
| 182 | 201012_at | 2.06E−06 | − |
| 176 | 201215_at | 1.92E−06 | + |
| 133 | 201300_s_at | 2.77E−07 | − |
| 164 | 201407_s_at | 1.39E−06 | − |
| 137 | 201564_s_at | 3.84E−07 | − |
| 150 | 201636_at | 9.98E−07 | − |
| 128 | 201833_at | 2.36E−07 | − |
| 152 | 201915_at | 1.02E−06 | − |
| 120 | 201980_s_at | 1.29E−07 | − |
| 158 | 202121_s_at | 1.22E−06 | + |
| 192 | 202146_at | 2.36E−06 | − |
| 142 | 202207_at | 6.93E−07 | − |
| 140 | 202320_at | 5.21E−07 | + |
| 189 | 202772_at | 2.26E−06 | + |
| 117 | 203384_s_at | 3.26E−08 | + |
| 121 | 203682_s_at | 1.30E−07 | + |
| 115 | 203702_s_at | 2.17E−08 | − |
| 149 | 204688_at | 9.46E−07 | − |
| 125 | 204751_x_at | 1.97E−07 | − |
| 183 | 204785_x_at | 2.12E−06 | − |
| 126 | 204881_s_at | 2.07E−07 | + |
| 159 | 205109_s_at | 1.27E−06 | − |
| 127 | 205300_s_at | 2.16E−07 | + |
| 122 | 205363_at | 1.31E−07 | − |
| 186 | 205429_s_at | 2.21E−06 | − |
| 123 | 205471_s_at | 1.65E−07 | + |
| 195 | 205996_s_at | 2.53E−06 | − |
| 167 | 206364_at | 1.53E−06 | − |
| 170 | 206565_x_at | 1.61E−06 | + |
| 155 | 208103_s_at | 1.15E−06 | − |
| 114 | 208358_s_at | 1.05E−08 | − |
| 151 | 209025_s_at | 1.01E−06 | − |
| 178 | 209170_s_at | 1.97E−06 | − |
| 175 | 209173_at | 1.90E−06 | + |
| 143 | 209396_s_at | 6.97E−07 | − |
| 147 | 209494_s_at | 8.55E−07 | + |
| 130 | 209531_at | 2.54E−07 | + |
| 160 | 209631_s_at | 1.30E−06 | − |
| 179 | 209745_at | 2.00E−06 | + |
| 169 | 210319_x_at | 1.59E−06 | + |
| 163 | 210466_s_at | 1.38E−06 | − |
| 194 | 210648_x_at | 2.43E−06 | − |
| 188 | 210687_at | 2.23E−06 | + |
| 168 | 210886_x_at | 1.54E−06 | + |
| 154 | 210942_s_at | 1.07E−06 | − |
| 180 | 211110_s_at | 2.03E−06 | + |
| 146 | 212314_at | 8.36E−07 | − |
| 190 | 212442_s_at | 2.28E−06 | + |
| 196 | 212462_at | 2.65E−06 | + |
| 181 | 212508_at | 2.06E−06 | + |
| 174 | 212759_s_at | 1.88E−06 | − |
| 156 | 212780_at | 1.17E−06 | − |
| 161 | 212846_at | 1.35E−06 | − |
| 136 | 213260_at | 3.42E−07 | − |
| 162 | 213419_at | 1.37E−06 | + |
| 197 | 214806_at | 2.87E−06 | − |
| 173 | 215723_s_at | 1.85E−06 | − |
| 187 | 217028_at | 2.22E−06 | − |
| 138 | 217823_s_at | 4.37E−07 | − |
| 132 | 217838_s_at | 2.60E−07 | + |
| 131 | 217929_s_at | 2.55E−07 | + |
| 118 | 218236_s_at | 5.30E−08 | − |
| 184 | 218440_at | 2.13E−06 | − |
| 119 | 218483_s_at | 1.17E−07 | + |
| 172 | 218489_s_at | 1.83E−06 | + |
| 165 | 218618_s_at | 1.44E−06 | − |
| 124 | 218931_at | 1.83E−07 | + |
| 157 | 219010_at | 1.20E−06 | − |
| 129 | 219100_at | 2.40E−07 | + |
| 134 | 219212_at | 2.87E−07 | − |
| 177 | 219562_at | 1.92E−06 | − |
| 145 | 219686_at | 8.16E−07 | + |
| 148 | 219806_s_at | 9.21E−07 | − |
| 185 | 219861_at | 2.19E−06 | + |
| 153 | 219889_at | 1.06E−06 | + |
| 139 | 220173_at | 4.62E−07 | + |
| 191 | 220432_s_at | 2.34E−06 | − |
| 166 | 220533_at | 1.51E−06 | − |
| 141 | 220658_s_at | 5.50E−07 | − |
| 171 | 221562_s_at | 1.67E−06 | + |
| 135 | 221641_s_at | 3.40E−07 | − |
| 144 | 222011_s_at | 7.79E−07 | − |
| 116 | 52940_at | 2.90E−08 | + |

[0082] Using Gene Ontology annotation, distinctive pathways were identified with P-value <0.05 for the three gene lists (FIGS. 3B, 3C, and 3D). For the 61 genes, the most significant pathway turned out to be the microtubule cytoskeleton organization pathway, followed by defense response, negative regulation of cell proliferation, glycolysis, digestion, vision, sodium ion-transport, ion-transport, and morphogenesis pathways. The negative regulation of cell proliferation pathway, in which retinoic acid receptor responder (tazarotene induced) 1 and BTG family member 3 genes were found down-regulated in ER+ tumors, has the most genes involved from the common gene list. An interesting discovery is the up-regulation in ER+ breast tumors of the microtubule-associated protein tau (MAPT) in the microtubule cytoskeleton organization and biogenesis pathway. This gene is differentially expressed in the nervous system (Binder et al. 1985) and its mutations result in several neurodegenerative disorders. Spillantini et al. (1998). Although its suppression in primate brains was reported in correlation with ingestion of phytoestrogen isoflavones (Kim et al. 2001), its up-regulation associated with ER status in breast tumor cells has not been shown before.

[0083] The significant pathways identified in the LCM sample unique gene list are the following: glycosphingolipid biosynthesis, endocytosis, RAS protein signal transduction, central nervous system development, metabolism, and homophilic cell adhesion. UDP-glucose ceramide glucosyltransferase and UDP glycosyltransferase 8 are involved in glycosphingolipid biosynthesis such as ceramide, which functions as a second messenger to signaling cascades that promote differentiation, senescence, proliferation, and apoptosis. Simstein et al. (2003). Although the mechanism underlying interactions within the ER pathway is unknown, ceramide generation was associated with tamoxifen-induced apoptosis (Mandlekar et al. 2001), and possibly interrupts estrogen's anti-apoptotic signaling pathways via the extracellular signal-regulated kinases (ERKs). Chen et al. (2005). Moreover, another identified pathway, endocytosis, has been associated with cell adhesion and migration in breast cancer via the Eph/Ephrin signaling pathway, which cross-activates the JAT-STAT pathway. Fox et al. 2004; and Poliakov et al. (2004). Members of the RAS oncogene family (RAB17 and RAB26) as well as genes involved in RAS protein signal transduction (SOS1 and PLD1) were identified. Hyperactive Ras can promote breast cancer growth and development, and affects upstream of the ERK/AKT signaling pathway. Eckert et al. (2004). It was demonstrated in MCF7 cells that Ras activity was required for nuclear export and degradation of p27 in response to estradiol and mediated a novel nongenomic pathway in promoting survival of breast cancer cells in culture. Fernando et al. (2004).

[0084] Transforming growth factor β (TGF-β) has been demonstrated to have both tumor suppression and stimulating effects during early and late stages of tumorigenesis. Akhurst et al. (2001). The cross talk between TGF-β signaling and estrogen signaling at DNA-dependent or -independent manners has been documented. Matsuda et al. (2001); Wu et al. (2003); and Ammanamanchi et al. (2004). A few genes that have implied action on TGF-β signaling were identified in the common and LCM unique gene lists. WW domain-containing protein 1 (WWP1), which is an E3 ubiquitin ligase expressed in epithelium was found to inhibit TGF-β signaling through inducing ubiquitination and degradation of the TGF-β type I receptor. Malbert-Colas et al. (2003); and Komuro et al. (2004). Sotiriou et al. (2003) also found this gene in their ER status associated gene list, although its interaction with the ER pathway is still unknown. DACH1 was shown to inhibit TGF-β induced apoptosis in breast cancer cell lines through binding Smad4, which is a transcription corepressor for ER-α by interacting with the AF1 domain of ER-α. Wu et al. (2003). FOXC1, a regulator of DACH1 (Tamimi et al. 2004), was also present in the LCM sample unique gene list. Up-regulation of WWP1 and DACH1 suggested that TGF-β signaling was suppressed in ER+ tumors. Further in the LCM unique gene list, there are genes involved in functions that have been related to the ER pathway, such as DNA-depended transcription regulation, cell surface receptor linked signal transduction, cell adhesion/motility, metabolic enzymes and apoptosis. Among them, some genes are known to interact with ER, such as HDAC2, ANXA1, and CCNB1. Additional investigation of the potential roles of these genes and their relations with ER may provide insights into estrogen signaling and the inter-relationships between these pathways.

[0085] On the other hand, for the genes that are unique to bulk tumor samples, pathways involved in chemotaxis and antimicrobial humoral response were ranked high. Cysteine-rich protein 1 (CRIP1) is produced in human peripheral blood mononuclear cells and is associated with host defense. Khoo et al. (1997). Ladinin 1 (LAD1) is a basement-membrane protein that may contribute to the stability of the association of the epithelial layers with the underlying mesenchyme. Marinkovich et al. (1996).

[0086] Although the foregoing invention has been described in some detail by way of illustration and example for purposes of clarity of understanding, the descriptions and examples should not be construed as limiting the scope of the invention.

TABLE 5
Sequence identifications

| | | | Accession | |
|---|---|---|---|---|
| SEQ ID NO | psid | Name | No | Description |
| 1 | 212494_at | TENC1 | AB028998 | Tensin like C1 domain containing phosphatase |
| 2 | 208682_s_at | MAGED2 | AF126181 | Melanoma antigen, family D, 2 |
| 3 | 203928_x_at | MAPT | AI870749 | Microtubule-associated protein tau |
| 4 | 216092_s_at | SLC7A8 | AL365347 | Solute carrier family 7 (cationic amino acid transporter, y+ system), mem 8 |
| 5 | 200811_at | CIRBP | NM_001280 | Cold inducible RNA binding protein |
| 6 | 204623_at | TFF3 | NM_003226 | Trefoil factor 3 (intestinal) |
| 7 | 205225_at | ESR1 | NM_000125 | Estrogen receptor 1 |
| 8 | 204508_s_at | CA12 | BC001012 | Carbonic anhydrase XII |
| 9 | 210347_s_at | BCL11A | AF080216 | B-cell CLL/lymphoma 11A (zinc finger protein) |
| 10 | 214053_at | ERBB4 | AW772192 | V-erb-a erythroblastic leukemia viral oncogene homolog 4 (avian) |
| 11 | 204304_s_at | PROM1 | NM_006017 | Prominin 1 |
| 12 | 209460_at | ABAT | AF237813 | 4-aminobutyrate aminotransferase |
| 13 | 203712_at | KIAA0020 | NM_014878 | KIAA0020 |
| 14 | 205009_at | TFF1 | NM_003225 | Trefoil factor 1 (breast cancer, estrogen-inducible sequence expressed in) |
| 15 | 206755_at | CYP2B6 | NM_000767 | Cytochrome P450, family 2, subfamily B, polypeptide 6 |
| 16 | 214440_at | NAT1 | NM_000662 | N-acetyltransferase 1 (arylamine N-acetyltransferase) |
| 17 | 209696_at | FBP1 | D26054 | Fructose-1,6-bisphosphatase 1 |
| 18 | 212692_s_at | LRBA | W60686 | LPS-responsive vesicle trafficking, beach and anchor containing |
| 19 | 205044_at | GABRP | NM_014211 | gamma-aminobutyric acid (GABA) A receptor, π |
| 20 | 214745_at | PLCL3 | AW665865 | phospholipase C-like 3 |
| 21 | 212638_s_at | WWP1 | BF131791 | WW domain containing E3 ubiquitin protein ligase 1 |
| 22 | 209602_s_at | GATA3 | AI796169 | GATA binding protein 3 |
| 23 | 200670_at | XBP1 | NM_005080 | X-box binding protein 1 |
| 24 | 201795_at | LBR | NM_002296 | Lamin B receptor |
| 25 | 212956_at | KIAA0882 | AI348094 | KIAA0882 protein |
| 26 | 209791_at | PADI2 | AL049569 | Peptidyl arginine deiminase, type II |
| 27 | 205548_s_at | KCNK15 | NM_022358 | Potassium channel, subfamily K, member 15 |
| 28 | 220540_at | BTG3 | NM_006806 | BTG family, member 3 |
| 29 | 201596_x_at | KRT18 | NM_000224 | Keratin 18 |
| 30 | 206392_s_at | RARRES1 | NM_002888 | Retinoic acid receptor responder (tazarotene induced) 1 |
| 31 | 220230_s_at | CYB5R2 | NM_016229 | Cytochrome b5 reductase b5R.2 |
| 32 | 207828_s_at | CENPF | NM_005196 | Centromere protein F, 350/400ka (mitosin) |
| 33 | 200747_s_at | NUMA1 | NM_006185 | Nuclear mitotic apparatus protein 1 |
| 34 | 203263_s_at | ARHGEF9 | AI625739 | Cdc42 guanine nucleotide exchange factor (GEF) 9 |
| 35 | 203909_at | SLC9A6 | NM_006359 | Solute carrier family 9 (sodium/hydrogen exchanger), isoform 6 |
| 36 | 221920_s_at | MSCP | BE677761 | Mitochondrial solute carrier protein |
| 37 | 212441_at | KIAA0232 | D86985 | KIAA0232 gene product |
| 38 | 212744_at | BBS4 | AI813772 | Bardet-Biedl syndrome 4 |
| 39 | 209191_at | MGC4083 | BC002654 | Tubulin β MGC4083 |
| 40 | 201030_x_at | LDHB | NM_002300 | Lactate dehydrogenase B |
| 41 | 211712_s_at | ANXA9 | BC005830 | Annexin A9 |
| 42 | 213923_at | RAP2B | AW005535 | Member of RAS oncogene family |
| 43 | 204872_at | TLE4 | NM_007005 | Transducin-like enhancer of split 4 (E(sp1) homolog, Drosophila) |
| 44 | 222125_s_at | PH-4 | BC000580 | Hypoxia-inducible factor prolyl 4-hydroxylase |
| 45 | 219197_s_at | SCUBE2 | NM_020974 | Signal peptide, CUB domain, EGF-like-2 |
| 46 | 202908_at | WFS1 | NM_006005 | Wolfram syndrome 1 (wolframin) |
| 47 | 212985_at | CCNB1 | BF115739 | Cyclin B1 |
| 48 | 202342_s_at | TRIM2 | NM_015271 | Tripartite motif-containing 2 |
| 49 | 203453_at | SCNN1A | NM_001038 | Sodium channel, nonvoltage-gated 1 α |
| 50 | 221203_s_at | YEATS2 | NM_018023 | YEATS domain containing 2 |
| 51 | 205862_at | GREB1 | NM_014668 | GREB1 protein |
| 52 | 218211_s_at | MLPH | NM_024101 | Melanophilin |
| 53 | 202554_s_at | GSTM3 | AL527430 | Glutathione S-transferase M3 (brain) |
| 54 | 204915_s_at | SOX11 | AB028641 | SRY (sex-determining region Y)-box 11 |
| 55 | 212496_s_at | JMJD2B | AW237172 | Jumonji domain containing 2B |
| 56 | 220016_at | MGC5395 | NM_024060 | Hypothetical protein MGC5395 |
| 57 | 206838_at | TBX19 | NM_005149 | T-box 19 |
| 58 | 202345_s_at | FABP5 | NM_001444 | Fatty acid binding protein 5 (psoriasis-associated) |
| 59 | 205376_at | INPP4B | NM_003866 | Inositol polyphosphate-4-phosphatase, type II, 105 kDa |
| 60 | 203256_at | CDH3 | NM_001793 | Cadherin 3, type 1, P-cadherin (placental) |
| 61 | 202035_s_at | SFRP1 | AF017987 | Secreted frizzled-related protein 1 |
| 62 | 202982_s_at | ZAP128 | NM_006821 | Peroxisomal long-chain acyl-coA thioesterase |
| 63 | 205186_at | DNALI1 | NM_003462 | Dynein, axonemal, light intermediate polypeptide 1 |
| 64 | 204822_at | TTK | NM_003318 | TTK protein kinase |
| 65 | 201037_at | PFKP | NM_002627 | Phosphofructokinase, platelet |
| 66 | 200804_at | TEGT | NM_003217 | Testis enhanced gene transcript (BAX inhibitor 1) |
| 67 | 202897_at | PTPNS1 | AB023430 | Protein tyrosine phosphatase, non-receptor type substrate 1 |
| 68 | 221934_s_at | FLJ10496 | BF941492 | Hypothetical protein FLJ10496 |
| 69 | 209122_at | ADFP | BC005127 | Adipose-differentiation related protein |
| 70 | 212276_at | LPIN1 | D80010 | Lipin-1 |
| 71 | 215304_at | NA | U79293 | Clone 23948 mRNA sequence |
| 72 | 209114_at | TSPAN-1 | AF133425 | Tetraspan 1 |
| 73 | 204540_at | EEF1A2 | NM_001958 | Eukaryotic translation elongation factor 1 α2 |
| 74 | 211967_at | PORIMIN | BG538627 | Pro-oncosis receptor inducing membrane injury gene |
| 75 | 210845_s_at | PLAUR | U08839 | Plasminogen activator, urokinase receptor |
| 76 | 213634_s_at | CELSR1 | AL031588 | Cadherin, EGF LAG seven-pass G-type receptor 1 (flamingo homolog, Drosophila) |
| 77 | 208873_s_at | C5orf18 | BC000232 | Chromosome 5 open reading frame 18 |
| 78 | 218534_s_at | VG5Q | NM_018046 | Angiogenic factor VG5Q |
| 79 | 220425_x_at | ROPN1 | NM_017578 | Ropporin, rhophilin associated protein 1 |
| 80 | 208788_at | ELOVL5 | AL136939 | ELOVL family member 5, elongation of long chain fatty acids (FEN1/Elo2, SUR4/Elo3) |
| 81 | 212501_at | CEBPB | AL564683 | CCAAT/enhancer binding protein (C/EBP), β |
| 82 | 51158_at | LOC400451 | AI801973 | Hypothetical gene supported by AK075564; BC060873 |
| 83 | 204284_at | PPP1R3C | N26005 | Protein phosphatase 1, regulatory (inhibitor) subunit 3C |
| 84 | 219918_s_at | ASPM | NM_018123 | asp (abnormal spindle)-like, microcephaly associated (Drosophila) |
| 85 | 211063_s_at | NCK1 | BC006403 | NCK adaptor protein 1 |
| 86 | 221834_at | LONP | AV700132 | Peroxisomal Ion protease |
| 87 | 218195_at | C6orf211 | NM_024573 | Chromosome 6 open reading frame 211 |
| 88 | 207571_x_at | C1orf38 | NM_004848 | Chromosome 1 open reading frame 38 |
| 89 | 216988_s_at | PTP4A2 | L48722 | Protein tyrosine phosphatase type IVA member 2 |
| 90 | 204667_at | FOXA1 | NM_004496 | Forkhead box A1 |
| 91 | 218854_at | SART2 | NM_013352 | Squamous cell carcinoma antigen recognized by T-cells 2 |
| 92 | 200719_at | SKP1A | BE964043 | S-phase kinase-associated protein 1A (p19A) |
| 93 | 201754_at | COX6C | NM_004374 | Cytochrome c oxidase subunit VIc |
| 94 | 213651_at | PIB5PA | AI935720 | Phosphatidylinositol (4,5) bisphosphate 5-phosphatase, A |
| 95 | 218104_at | TEX10 | NM_017746 | Testis expressed sequence 10 |
| 96 | 209870_s_at | APBA2 | AB014719 | Amyloid β (A4) precursor protein-binding, family A, member 2 (X11-like) |
| 97 | 204567_s_at | ABCG1 | NM_004915 | ATP-binding cassette, sub-family G (WHITE), member 1 |
| 98 | 210397_at | DEFB1 | U73945 | Defensin, β1 |
| 99 | 219615_s_at | KCNK5 | NM_003740 | Potassium channel, subfamily K, member 5 |
| 100 | 202089_s_at | SLC39A6 | NM_012319 | Solute carrier family 39 (zinc transporter), member 6 |
| 101 | 214431_at | GMPS | NM_003875 | Guanine monophosphate synthetase |
| 102 | 60471_at | RIN3 | AA625133 | Ras and Rab interactor 3 |
| 103 | 209324_s_at | RGS16 | BF304996 | Regulator of G-protein signalling 16 |
| 104 | 218532_s_at | FLJ20152 | NM_019000 | Hypothetical protein FLJ20152 |
| 105 | 205081_at | CRIP1 | NM_001311 | Cysteine-rich protein 1 (intestinal) |
| 106 | 218239_s_at | GTPBP4 | NM_012341 | GTP binding protein 4 |
| 107 | 215329_s_at | SLC35E2 | AL031282 | Solute carrier family 35, member E2 |
| 108 | 217979_at | TM4SF13 | NM_014399 | Transmembrane 4 superfamily member 13 |
| 109 | 218966_at | MYO5C | NM_018728 | Myosin VC |
| 110 | 203773_x_at | BLVRA | NM_000712 | Biliverdin reductase A |
| 111 | 203287_at | LAD1 | NM_005558 | Ladinin 1 |
| 112 | 206249_at | MAP3K13 | NM_004721 | Mitogen-activated protein kinase kinase kinase 13 |
| 113 | 200824_at | GSTP1 | NM_000852 | Glutathione S-transferase π |
| 114 | 208358_s_at | UGT8 | NM_003360 | UDP glycosyltransferase 8 (UDP-galactose ceramide galactosyltransferase) |
| 115 | 203702_s_at | TTLL4 | AL043927 | Tubulin tyrosine ligase-like family, member 4 |
| 116 | 52940_at | SIGIRR | AA085764 | Signal Ig IL-1R-related molecule |
| 117 | 203384_s_at | GOLGA1 | NM_002077 | Golgi autoantigen, golgin subfamily a, 1 |
| 118 | 218236_s_at | PRKD3 | NM_005813 | Protein kinase D3 |
| 119 | 218483_s_at | FLJ21827 | NM_020153 | Hypothetical protein FLJ21827 |
| 120 | 201980_s_at | RSU1 | NM_012425 | Ras suppressor protein 1 |
| 121 | 203682_s_at | IVD | NM_002225 | Isovaleryl Coenzyme A dehydrogenase |
| 122 | 205363_at | BBOX1 | NM_003986 | Butyrobetaine (γ), 2-oxoglutarate dioxygenase (γ butyrobetaine) |
| 123 | 205471_s_at | DACH1 | NM_004392 | Dachshund homolog 1 (Drosophila) |
| 124 | 218931_at | RAB17 | NM_022449 | RAB17, member RAS oncogene family |
| 125 | 204751_x_at | DSC2 | NM_004949 | Desmocollin 2 |
| 126 | 204881_s_at | UGCG | NM_003358 | UDP-glucose ceramide glucosyltransferase |
| 127 | 205300_s_at | U1SNRNPBP | NM_022717 | U11/U12 snRNP 35K |
| 128 | 201833_at | HDAC2 | NM_001527 | histone deacetylase 2 |
| 129 | 219100_at | OBFC1 | NM_024928 | oligonucleotide/oligosaccharide-binding fold containing 1 |
| 130 | 209531_at | GSTZ1 | BC001453 | glutathione transferase zeta 1 (maleylacetoacetate isomerase) |
| 131 | 217929_s_at | PKD1-like | NM_024874 | polycystic kidney disease 1-like |
| 132 | 217838_s_at | EVL | NM_016337 | Enah/Vasp-like |
| 133 | 201300_s_at | PRNP | NM_000311 | prion protein (p27-30) |
| 134 | 219212_at | HSPA14 | NM_016299 | heat shock 70 kDa protein 14 |
| 135 | 221641_s_at | ACATE2 | AF241787 | likely ortholog of mouse acyl-Coenzyme A thioesterase 2, mitochondrial |
| 136 | 213260_at | FOXC1 | AU145890 | forkhead box C1 |
| 137 | 201564_s_at | FSCN1 | NM_003088 | fascin homolog 1, actin-bundling protein (Strongylocentrotus purpuratus) |
| 138 | 217823_s_at | UBE2J1 | AF151039 | ubiquitin-conjugating enzyme E2, J1 (UBC6 homolog, yeast) |
| 139 | 220173_at | C14orf45 | NM_025057 | chromosome 14 open reading frame 45 |
| 140 | 202320_at | GTF3C1 | NM_001520 | general transcription factor IIIC, polypeptide 1, α 220 kDa |
| 141 | 220658_s_at | ARNTL2 | NM_020183 | aryl hydrocarbon receptor nuclear translocator-like 2 |
| 142 | 202207_at | ARL7 | BG435404 | ADP-ribosylation factor-like 7 |
| 143 | 209396_s_at | CHI3L1 | M80927 | chitinase 3-like 1 (cartilage glycoprotein-39) |
| 144 | 222011_s_at | TCP1 | BF224073 | t-complex 1 |
| 145 | 219686_at | STK32B | NM_018401 | serine/threonine kinase 32B |
| 146 | 212314_at | KIAA0746 | AB018289 | KIAA0746 protein |
| 147 | 209494_s_at | ZNF278 | AI807017 | zinc finger protein 278 |
| 148 | 219806_s_at | FN5 | NM_020179 | FN5 protein |
| 149 | 204688_at | SGCE | NM_003919 | sarcoglycan, epsilon |
| 150 | 201636_at | NA | BG025078 | Homo sapiens cDNA clone IMAGE: 4364070 |
| 151 | 209025_s_at | SYNCRIP | AF037448 | synaptotagmin binding, cytoplasmic RNA interacting protein |
| 152 | 201915_at | SEC63 | NM_007214 | SEC63-like (S. cerevisiae) |
| 153 | 219889_at | FRAT1 | NM_005479 | frequently rearranged in advanced T-cell lymphomas |
| 154 | 210942_s_at | SIAT10 | AB022918 | sialyltransferase 10 (α-2,3-sialyltransferase VI) |
| 155 | 208103_s_at | ANP32E | NM_030920 | acidic (leucine-rich) nuclear phosphoprotein 32 family, member E |
| 156 | 212780_at | SOS1 | AA700167 | son of sevenless homolog 1 (Drosophila) |
| 157 | 219010_at | FLJ10901 | NM_018265 | hypothetical protein FLJ10901 |
| 158 | 202121_s_at | BC-2 | NM_014453 | putative breast adenocarcinoma marker (32 kD) |
| 159 | 205109_s_at | ARHGEF4 | NM_015320 | Rho guanine nucleotide exchange factor (GEF) 4 |
| 160 | 209631_s_at | GPR37 | U87460 | G protein-coupled receptor 37 (endothelin receptor type B-like) |
| 161 | 212846_at | KIAA0179 | AA811192 | KIAA0179 |
| 162 | 213419_at | APBB2 | U62325 | amyloid β (A4) precursor protein-binding, family B, member 2 |
| 163 | 210466_s_at | PAI-RBPI | BC002488 | PAI-1 mRNA-binding protein |
| 164 | 201407_s_at | PPP1CB | AI186712 | protein phosphatase 1, catalytic subunit, β isoform |
| 165 | 218618_s_at | FAD104 | NM_022763 | factor for adipocyte differentiation 104 |
| 166 | 220533_at | FLJ13385 | NM_024853 | hypothetical protein FLJ13385 |
| 167 | 206364_at | KIF14 | NM_014875 | kinesin family member 14 |
| 168 | 210886_x_at | TP53AP1 | AB007457 | TP53 activated protein 1 |
| 169 | 210319_x_at | MSX2 | D89377 | msh homeobox homolog 2 (Drosophila) |
| 170 | 206565_x_at | SMA3 | NM_006780 | SMA3 |
| 171 | 221562_s_at | SIRT3 | AF083108 | sirtuin (silent mating type information regulation 2 homolog) 3 (S. cerevisiae) |
| 172 | 218489_s_at | ALAD | BC000977 | aminolevulinate, delta-, dehydratase |
| 173 | 215723_s_at | PLD1 | AJ276230 | phospholipase D1, phosphatidylcholine-specific |
| 174 | 212759_s_at | TCF7L2 | AI703074 | transcription factor 7-like 2 (T-cell specific, HMG-box) |
| 175 | 209173_at | AGR2 | AF088867 | anterior gradient 2 homolog (Xenopus laevis) |
| 176 | 201215_at | RAB26 | NM_014353 | RAB26, member RAS oncogene family |
| 177 | 219562_at | PLS3 | NM_005032 | plastin 3 (T isoform) |
| 178 | 209170_s_at | GPM6B | AI419030 | glycoprotein M6B |
| 179 | 209745_at | COQ7 | AK024291 | coenzyme Q7 homolog, ubiquinone (yeast) |
| 180 | 211110_s_at | AR | AF162704 | androgen receptor (dihydrotestosterone receptor; testicular feminization) |
| 181 | 212508_at | MOAP1 | AK024029 | modulator of apoptosis 1 |
| 182 | 201012_at | ANXA1 | NM_000700 | annexin A1 |
| 183 | 204785_x_at | IFNAR2 | L41944 | interferon (α, β and omega) receptor 2 |
| 184 | 218440_at | MCCC1 | NM_020166 | methylcrotonoyl-Coenzyme A carboxylase 1 (α) |
| 185 | 219861_at | FLJ10634 | NM_018163 | hypothetical protein FLJ10634 |
| 186 | 205429_s_at | MPP6 | NM_016447 | membrane protein, palmitoylated 6 (MAGUK p55 subfamily member 6) |
| 187 | 217028_at | CXCR4 | AJ224869 | chemokine (C—X—C motif) receptor 4 |
| 188 | 210687_at | CPT1A | BC000185 | carnitine palmitoyltransferase 1A (liver) |
| 189 | 202772_at | HMGCL | NM_000191 | 3-hydroxymethyl-3-methylglutaryl-Coenzyme A lyase |
| 190 | 212442_s_at | LASS6 | BG289001 | LAG1 longevity assurance homolog 6 (S. cerevisiae) |
| 191 | 220432_s_at | CYP39A1 | NM_016593 | cytochrome P450, family 39, subfamily A, polypeptide 1 |
| 192 | 202146_at | IFRD1 | AA747426 | interferon-related developmental regulator 1 |
| 193 | 200790_at | ODC1 | NM_002539 | ornithine decarboxylase 1 |
| 194 | 210648_x_at | SNX3 | AB047360 | sorting nexin 3 |
| 195 | 205996_s_at | AK2 | NM_013411 | adenylate kinase 2 |
| 196 | 212462_at | MYST4 | AU144267 | MYST histone acetyltransferase (monocytic leukemia) 4 |
| 197 | 214806_at | BICD1 | U90030 | bicaudal D homolog 1 (Drosophila) |

### REFERENCES

[0087] U.S. Pat. Nos. 5,445,934; 5,532,128; 5,556,752; 5,242,974; 5,384,261; 5,405,783; 5,412,087; 5,424,186; 5,429,807; 5,436,327; 5,472,672; 5,527,681; 5,529,756; 5,545,531; 5,554,501; 5,561,071; 5,571,639; 5,593,839; 5,599,695; 5,624,711; 5,658,734; 5,700,637; 6,004,755; 6,136,182; 6,218,114; 6,218,122; and 6,271,002
[0088] US patent publication: 20030194734
[0089] Akhurst et al. (2001) Trends Cell Biol. 11:S44-51.
[0090] Ammanamanchi et al. (2004) J Biol Chem 279:32620-5.
[0091] Binder et al. (1985) J Cell Biol. 101:1371-8.
[0092] Chen et al. (2005) J Biol Chem. 280:4632-4638
[0093] Eckert et al. (2004) Cancer Res. 64:4585-92.
[0094] Emmert-Buck et al. (1996) Science 274:998-1001.
[0095] Erlander et al. (2004) WO 2004/07014.
[0096] Fernando et al. (2004) Mol. Biol. Cell 15:3266-84.
[0097] Foekens et al. (1989) Cancer Res. 49:5823-8.
[0098] Fox et al. (2004) Biochem. Biophys. Res. Commun. 318:882-92.
[0099] Golub et al. (1999) “Molecular classification of cancer: class discovery and class prediction by gene expression monitoring” Science 286:531-537
[0100] Gruvberger et al. (2001) Cancer Res. 61:5979-84.
[0101] Hall et al. (2001) J Biol Chem. 276:36869-72.
[0102] Kamme et al. (2004) Methods Mol. Med. 99:215-23.
[0103] Khoo et al. (1997) Protein Exp. Purif. 9:379-87.
[0104] Komuro et al. (2004) Oncogene 23:6914-23.
[0105] Luo et al. (1999) Nat. Med. 5:117-22.
[0106] Lutfalla et al. (1995) EMBO J. 14:5100-8.
[0107] Luzzi et al. (2003) J. Mol. Diagn. 5:9-14.
[0108] Ma et al. (2003) Proc. Natl. Acad. Sci. USA 100:5974-9.
[0109] Malbert-Colas et al. (2003) Pflugers Arch. 447:35-43.
[0110] Mandlekar et al. (2001) Apoptosis 6:469-77.
[0111] Marinkovich et al. (1996) J Invest. Dermatol. 106:734-8.
[0112] Matsui et al. (2003) Anticancer Res. 23:195-200.
[0113] Moggs et al. (2001) EMBO Rep. 2:775-81.
[0114] Mokbel (2003) Curr. Med. Res. Opin. 19:683-8.
[0115] Nakamura et al. (2004) Oncogene 23:2385-400.
[0116] Nishidate et al. (2004) Int. J. Oncol. 25:797-819.
[0117] Parl (2000) “Estrogens, estrogen receptor and breast cancer” IOS Press/Ohmsha Amsterdam
[0118] Polacek et al. (2003) Physiol. Genomics 13:147-56.
[0119] Poliakov et al. (2004) Dev. Cell 7:465-80.
[0120] Ramaswamy et al. (2001) “Multiclass cancer diagnosis using tumor gene expression signatures” Proc Natl Acad Sci USA 98:15149-15154
[0121] Seth et al. (2003) Anticancer Res. 23:2043-51.
[0122] Simstein et al. (2003) Exp. Biol. Med. 228:995-1003.
[0123] Sotiriou et al. (2003) Proc. Natl. Acad. Sci. USA 100: 10393-8.
[0124] Spillantini et al. (1998) Trends Neurosci. 21:428-33.
[0125] Su et al. (2001) “Molecular classification of human carcinomas by use of gene expression signatures” Cancer Res 61:7388-7393
[0126] Sun et al. (2005) Exp. Cell Res. 302:96-107.
[0127] Tamimi et al. (2004) Invest. Opthalmol. Vis. Sci. 45:3904-13.
[0128] van't Veer et al. (2002) “Gene expression profiling predicts clinical outcome of breast cancer” Nature West et al. (2001) Proc. Natl. Acad. Sci. USA 98:11462-7.
[0129] Wu et al. (2003) J. Biol. Chem. 278:15192-200.
[0130] Wu et al. (2003) J. Biol. Chem. 278:51673-84.
[0131] Yim et al. (2003) Toxicol. Pathol. 31:295-303.

1. A method of determining estrogen receptor expression status comprising the steps of
a. obtaining a bulk tissue tumor sample from a breast cancer patient; and
b. measuring the expression levels in the sample of genes selected from the group consisting of those encoding mRNA:
i. corresponding to SEQ ID Nos listed in Table 2 or 3; or
ii. recognized by the probe sets selected from the group consisting of psids corresponding to SEQ ID Nos listed in Table 2 or 3
wherein the gene expression levels above or below pre-determined cut-off levels are indicative of estrogen receptor expression status.

2. A method of determining estrogen receptor expression status comprising the steps of
a. obtaining a microscopically isolated tumor sample from a breast cancer patient; and
b. measuring the expression levels in the sample of genes selected from the group consisting of those encoding mRNA:
i. corresponding to SEQ ID Nos listed in Table 2 or 4; or
ii. recognized by the probe sets selected from the group consisting of psids corresponding to SEQ ID Nos listed in Table 2 or 4
wherein the gene expression levels above or below pre-determined cut-off levels are indicative of estrogen receptor expression status.

3. A method of determining breast cancer patient treatment protocol comprising the steps of
a. obtaining a bulk tissue tumor sample from a breast cancer patient; and
b. measuring the expression levels in the sample of genes selected from the group consisting of those encoding mRNA:
i. corresponding to SEQ ID Nos listed in Table 2 or 3; or
ii. recognized by the probe sets selected from the group consisting of psids corresponding to SEQ ID Nos listed in Table 2 or 3
wherein the gene expression levels above or below pre-determined cut-off levels are sufficiently indicative of risk of recurrence to enable a physician to determine the degree and type of therapy recommended to prevent recurrence.

4. A method of determining breast cancer patient treatment protocol comprising the steps of
a. obtaining a microscopically isolated tumor sample from a breast cancer patient; and
b. measuring the expression levels in the sample of genes selected from the group consisting of those encoding mRNA:
i. corresponding to SEQ ID Nos listed in Table 2 or 4; or
ii. recognized by the probe sets selected from the group consisting of psids corresponding to SEQ ID Nos listed in Table 2 or 4
wherein the gene expression levels above or below pre-determined cut-off levels are sufficiently indicative of risk of recurrence to enable a physician to determine the degree and type of therapy recommended to prevent recurrence.

5. A method of treating a breast cancer patient comprising the steps of:
a. obtaining a bulk tissue tumor sample from a breast cancer patient; and
b. measuring the expression levels in the sample of genes selected from the group consisting of those encoding mRNA:
i. corresponding to SEQ ID Nos listed in Table 2 or 3; or
ii. recognized by the probe sets selected from the group consisting of psids corresponding to SEQ ID Nos listed in Table 2 or 3 and;
c. treating the patient with adjuvant therapy if they are a high risk patient.

6. A method of treating a breast cancer patient comprising the steps of:
a. obtaining a microscopically isolated tumor sample from a breast cancer patient; and
b. measuring the expression levels in the sample of genes selected from the group consisting of those encoding mRNA:
i. corresponding to SEQ ID Nos listed in Table 2 or 4; or
ii. recognized by the probe sets selected from the group consisting of psids corresponding to SEQ ID Nos listed in Table 2 or 4 and;
c. treating the patient with adjuvant therapy if they are a high risk patient.

7. The method of any one of claims 1-6 wherein the sample is obtained from a primary tumor.

8. The method of claim 1, 3 or 5 wherein the bulk tissue preparation is obtained from a biopsy or a surgical specimen.

9. The method of claim 2, 4 or 6 wherein the microscopic isolation is by laser capture microdissection.

10. The method of any one of claims 1-6 further comprising measuring the expression level of at least one gene constitutively expressed in the sample.

11. The method of any one of claims 1-6 wherein the specificity is at least about 40%.

12. The method of any one of claims 1-6 wherein the sensitivity is at least at least about 90%.

13. The method of any one of claims 1-6 wherein the expression pattern of the genes is compared to an expression pattern indicative of a relapse patient.

14. The method of claim 13 wherein the comparison of expression patterns is conducted with pattern recognition methods.

15. The method of claim 14 wherein the pattern recognition methods include the use of a Cox's proportional hazards analysis.

16. The method of any one of claims 1-6 wherein the pre-determined cut-off levels are at least 1.5-fold over- or under-expression in the sample relative to benign cells or normal tissue.

17. The method of any one of claims 1-6 wherein the pre-determined cut-off levels have at least a statistically significant p-value over- or under-expression in the sample having metastatic cells relative to benign cells or normal tissue.

18. The method of claim 17 wherein the p-value is less than 0.05.

19. The method of any one of claims 1-6 wherein gene expression is measured on a microarray or gene chip.

20. The method of claim 19 wherein the microarray is a cDNA array or an oligonucleotide array.

21. The method of claim 20 wherein the microarray or gene chip further comprises one or more internal control reagents.

22. The method of any one of claims 1-6 wherein gene expression is determined by nucleic acid amplification conducted by polymerase chain reaction (PCR) of RNA extracted from the sample.

23. The method of claim 22 wherein said PCR is reverse transcription polymerase chain reaction (RT-PCR).

24. The method of claim 23, wherein the RT-PCR further comprises one or more internal control reagents.

25. The method of any one of claims 1-6 wherein gene expression is detected by measuring or detecting a protein encoded by the gene.

26. The method of claim 25 wherein the protein is detected by an antibody specific to the protein.

27. The method of any one of claims 1-6 wherein gene expression is detected by measuring a characteristic of the gene.

28. The method of claim 27 wherein the characteristic measured is selected from the group consisting of DNA amplification, methylation, mutation and allelic variation.

29. A composition comprising at least one probe set selected from the group consisting of the SEQ ID NOs: listed in Table 2, 3 and/or 4.

30. A kit for conducting an assay to determine estrogen receptor expression status a biological sample comprising: materials for detecting isolated nucleic acid sequences, their complements, or portions thereof of a combination of genes selected from the group consisting of those encoding mRNA corresponding to the SEQ ID NOs: listed in Table 2, 3 and/or 4.

31. The kit of claim 30 wherein the SEQ ID NOs. are those in Table 2 and/or 3.

32. The kit of claim 30 wherein the SEQ ID NOs. are listed in Table 2 and/or 4.

33. The kit of claim 30 further comprising reagents for conducting a microarray analysis.

34. The kit of claim 30 further comprising a medium through which said nucleic acid sequences, their complements, or portions thereof are assayed.

35. Articles for assessing breast cancer status comprising: materials for detecting isolated nucleic acid sequences, their complements, or portions thereof of a combination of genes selected from the group consisting of those encoding mRNA corresponding to the SEQ ID NOs: listed in Table 2, 3 and/or 4.

36. The articles of claim 35 wherein the SEQ ID NOs. are those in Table 2 and/or 3.

37. The articles of claim 35 wherein the SEQ ID NOs. are listed in Table 2 and/or 4.

38. The articles of claim 35 further comprising reagents for conducting a microarray analysis.

39. The articles of claim 35 further comprising a medium through which said nucleic acid sequences, their complements, or portions thereof are assayed.

40. A microarray or gene chip for performing the method of any one of claims 1-6.

41. The microarray of claim 40 comprising isolated nucleic acid sequences, their complements, or portions thereof of a combination of genes selected from the group consisting of those encoding mRNA corresponding to the SEQ ID NOs: listed in Table 2, 3 and/or 4.

42. The microarray of claim 41 comprising a cDNA array or an oligonucleotide array.

43. The microarray of claim 41 further comprising or more internal control reagents.

44. A diagnostic/prognostic portfolio comprising isolated nucleic acid sequences, their complements, or portions thereof of a combination of genes selected from the group consisting of those encoding mRNA corresponding to the SEQ ID NOs: listed in Table 2, 3 and/or 4.

The application's sequence listing, which the Patent Office published only in electronic form, follows.

SEQUENCE LISTING (197 sequences)

SEQ ID NO: 1 - DNA, 4692 bp, human
gcgcggcccggctggccgtctgcgcaccctctctcccctcggctctttcctaggaaagctgagcctcatagcttccgggagaaggttttccggaagaaacctccagtctgtgcagtatgtaaggtgaccatcgatgggacaggcgtttcgtgcagagtctgcaaggtggcgacgcacagaaaatgtgaagcaaaggtgacttcagcctgtcaggccttgcctcccgtggagttgcggcgaaacacggccccagtcaggcgcatagagcacctgggatccaccaaatctctgaaccactcaaagcagcgcagcactctgcccaggagcttcagcctggacccgctcatggagcggcgctgggacttagacctcacctacgtgacggagcgcatcttggccgccgccttccccgcgcggcccgatgaacagcggcaccggggccacctgcgcgagctggcccatgtgctgcaatccaagcaccgggacaagtacctgctcttcaacctttcagagaaaaggcatgacctgacccgcttaaaccccaaggttcaagacttcggctggcctgagctgcatgctccacccctggacaagctgtgctccatctgcaaagccatggagacatggctcagtgctgacccacagcacgtggtcgtactatactgcaagggaaacaagggcaagcttggggtcatcgtttctgcctacatgcactacagcaagatctctgcaggggcggaccaggcactggccactcttaccatgcggaaattctgcgaggacaaggtggccacagaactgcagccctcccagcgtcgatatatcagctacttcagtgggctgctatctggctccatcagaatgaacagcagccctctcttcctgcactatgtgctcatccccatgctgccagcctttgaacctggcacaggcttccagcccttccttaaaatctaccagtccatgcagcttgtctacacatctggagtctatcacattgcaggccctggtccccagcagctttgcatcagcctggagccagccctcctcctcaaaggcgatgtcatggtaacatgttatcacaagggtggccggggcacagaccggaccctcgtgttccgagtccagttccacacctgcaccatccacggaccacagctcactttccccaaggaccagcttgacgaggcctggactgatgagaggttccccttccaagcctccgtggagtttgtcttctcctccagccccgagaagatcaaaggcagcactccacggaacgacccctcggtctctgtcgactacaacaccactgagccagccgtgcgctgggactcctatgagaacttcaaccagcaccacgaggacagtgtggatggctccttgacccacacccggggtcccctggatggcagtccttatgcccaggtgcagcggcctccccggcagacccccccggcaccctctccagagcctccaccaccccccatgctctctgtcagcagcgactcaggccattcctccacgctgaccacagagccggctgctgagtcccctggccggccgccccctacagctgctgaacggcaggagctggatcgcctcctaggaggctgcggagtggccagtgggggccggggagctgggcgcgagacggccatcctagatgacgaagagcagcccactgtgggcggaggcccccacctcggagtgtatccaggccataggcctggcctcagccgccactgctcctgccgccagggctaccgggagccctgcggggttcccaatgggggctactaccggccagagggaaccctggagaggaggcgactggcctacgggggctatgagggatccccccagggctacgccgaggcctcgatggagaagaggcgcctctgccgatcgctgtcagaggggctatacccctacccacctgagatggggaaaccagccactggggactttggctaccgcgccccaggctaccgggaggtggtcatcctggaggaccctgggctgcctgccctatacccatgcccagcctgcgaggagaagctggcgctgcctacagcagccttgtatggactgcggctggagagggaggctggagaagggtgggcaagtgaggctggcaagcctctcctgcacccagtgcggcctgggcacccgctgcctctgctcttgcctgcctgtgggcatcaccatgccccgatgcctgactacagctgcctgaagccacccaaggcaggcgaggaagggcacgagggctgctcctacaccatgtgccccgaaggcaggtatgggcatccagggtaccctgccctggtgacatacagctatggaggagcagttcccagttactgcccagcatatggccgtgtgcctcatagctgtggctctccaggagagggcagagggtatcccagccctggtgcccactccccacgggctggctccatttccccgggcagcccgccctatccacaatctaggaagctgagctacgagatccctacggaggagggaggggacaggtacccattgcctgggcacctggcctcagcaggacctttggcatctgcagagtcgctggagccggtgtcctggagggagggccccagtgggcacagcacactgcctcggtctccccgagatgccccatgcagtgcttcgtcagagttgtctggtccctccacgcccctgcacaccagcagtccagtccagggcaaggaaagcacccggcgacaggacaccaggtcccccacctcagcgcccactcagagactgagtcctggcgaggccttgccccctgtttcccaggcaggcaccggaaaggcccctgagctgccgtcgggaagtgggcctgagcctctggcccctagcccagtctctccgaccttccctcccagctcgcccagtgactggcctcaggaaaggagtccagggggccactcagatggcgccagtcctcggagccctgtgcccaccacacttcctggcctccgccacgccccctggcaaggccctcgaggcccccccgacagcccagatgggtctcccctcactcctgtgccttcccagatgccctggcttgtggccagcccagagccgcctcagagctcacctacacctgctttccccctggctgcctcctatgacaccaatggccttagccagcccccacttcctgagaaacgccacctgcccgggccggggcaacagccaggaccctggggcccagagcaggcatcatcgccagccagaggcatcagtcaccatgtcaccttcgcacctctgctctcagataatgtcccccaaaccccagagcctcctacacaagagagccaaagcaatgtcaagtttgtccaggatacatccaagttctggtacaagccacacctgtcccgtgaccaagccattgccctgctgaaggacaaggaccctggggccttcctgatcagggacagtcattcattccaaggagcttatgggctggccctcaaggtggccacaccgccacccagtgcccagccctggaaaggggaccccgtggaacagctggtccgccatttcctcatcgagactgggcccaaaggggtgaagatcaagggctgccccagtgagccctactttggcagcctgtccgccttggtctcccagcactccatctcccccatctccctgccctgctgcctgcgcattctcagcaaagatcctctggaagagaccccagaggctccagtgcccaccaacatgagcacagcggcagacctcctgcgtcagggtgctgcctgcagcgtgctctacttgacctcagtggagacagagtcactgacgggcccccaagctgtggcccgggccagctctgcagctctgagctgtagcccccgcccgacaccagctgttgtccacttcaaggtgtcagcccagggcattacactgacggacaaccaaaggaagctcttctttcgccgccattatccagtgaacagcatcaccttctccagcactgaccctcaagaccggagatggaccaacccagacgggaccacctccaagatctttggtttcgtggccaagaagccgggaagcccctgggagaatgtgtgtcacctctttgcagagcttgacccagatcagcctgctggcgccattgtcaccttcatcaccaaagttctactgggccagagaaaatgaaggaaggccacaagctcagagcccacatcaacactgcccccctcccagcaccccacagccctcacatcccctggcctggacccaggagacccaggagaaagcaccctcccttaggaatgaggagtgggcatcaggcctgggacactgctctccttccccgcccccagcctgctaagttaagtggacaggcccacaagatgaccttgcatgtgagcagatggcagagatgggtgtgtgaggggtgaggaggcatcagcagttgagccccgaaggagatcaggcagccccacctgcaggagaacgtcagccctccaggggatcagcccctgccagttccacccagctgcaggtgccagcacggcagggatgggagaggggtggggagcgagtcactgcctcctctgagcagagattcagagtaggatcacatgaataggggaaaaaagagagtctatttttgtctaataataaagaatttctataaacttt

SEQ ID NO: 2 - DNA, 1904 bp, human
tagagaaggcagacgcatcccgaactcgctggaggacaaggctcagctcttgccaggccaaattgagacatgtctgacacaagcgagagtggtgcaggtctaactcgcttccaggctgaagcttcagaaaaggacagtagctcgatgatgcagactctgttgacagtgacccagaatgtggaggtcccagagacaccgaaggcctcaaaggcactggaggtctcagaggatgtgaaggtctcaaaagcctctggggtctcaaaggccacagaggtctcaaagaccccagaggctcgggaggcacctgccacccaggcctcgtctactactcagctgactgatacccaggttctggcagctgaaaacaagagtctagcagctgacaccaagaaacagaatgctgacccgcaggctgtgacaatgcctgccactgagaccaaaaaggtcagccatgtggctgatacgaaggtcaatacaaaggctcaggagactgaggctgcaccctctcaggccccagcagatgaacctgagcctgagagtgcagctgcccagtctcaggagaatcaggatactcggcccaaggtcaaagccaagaaagcccgaaaggtgaagcatctggatggggaagaggatggcagcagtgatcagagtcaggcttctggaaccacaggtggccgaagggtctcaaaggctctaatggcctcaatggcccgcagggcttcaaggggtcccatagccttttgggcccgcagggcatcaaggactcggttggctgcttgggcccggagagccttgctctccctgagatcacctaaagcccgtaggggcaaggctcgccgtagagctgccaagctccagtcatcccaagagcctgaagcaccaccacctcgggatgtggcccttttgcaagggagggcaaatgatttggtgaagtaccttttggctaaagaccagacgaagattcccatcaagcgctcggacatgctgaaggacatcatcaaagaatacactgatgtgtaccccgaaatcattgaacgagcaggctattctttggagaaggtatttgggattcaattgaaggaaattgataagaatgaccacttgtacattcttctcagcaccttagagcccactgatgcaggcatactgggaacgactaaggactcacccaagctgggtctgctcatggtgcttcttagcatcatcttcatgaatggaaatcggtccagtgaggctgtcatctgggaggtgctgcgcaagttggggctgcgccctgggatacatcattcactctttggggacgtgaagaagctcatcactgatgagtttgtgaagcagaagtacctggactatgccagagtccccaatagcaatccccctgaatatgagttcttctggggcctgcgctcttactatgagaccagcaagatgaaagtcctcaagtttgcctgcaaggtacaaaagaaggatcccaaggaatgggcagctcagtaccgagaggcgatggaagcggatttgaaggctgcagctgaggctgcagctgaagccaaggctagggccgagattagagctcgaatgggcattgggctcggctcggagaatgctgccgggccctgcaactgggacgaagctgatatcggaccctgggccaaagcccggatccaggcgggagcagaagctaaagccaaagcccaagagagtggcagtgccagcactggtgccagtaccagtaccaataacagtgccagtgccagtgccagcaccagtggtggcttcagtgctggtgccagcctgaccgccactctcacatttgggctcttcgctggccttggtggagctggtgccagcaccagtggcagctctggtgcctgtggtttctcctacaagtgagattttagatattg

SEQ ID NO: 3 - DNA, 777 bp, human
  misc_feature (530)..(530): n is a, c, g, or t
  misc_feature (556)..(556): n is a, c, g, or t
ttttttaaatattttattactagcccacccatcaatttggaaagatgaaatttgctcttactcccatcactgattttgaagtcccgagccaaagccgagtgacaaaagcaggttaagtgattaaccaattaaccgaactgcgaggagcagctgggggcagagggcgggggccgggtcattattctttttttttccacactctctcattctctcctctccacaattattgaccgccccaggggcctgatcacaaaccctgcttggccagggaggcagacacctcgtcagctagcgtggcgagctggggcgagtctaccatgtcgatgctgccggtggaggagacattgctgagatgccgtggagacgtgtccccagacaccactggcgacttgtacacgatctccgccccgtggtctgtcttggctttggcgttctcgcggaaggtcagcttgtgggtttcaatctttttatttcctccgccagggacgtgggtgatattgtccagggacccaatcttcgactggactctngccttgaagtcaagcttctcagattntactttcacctggccacctcctggtttatgaatgatgttgcctaatgagccacacttggaggtcaccttgctcaggtcaactggtttgtagactatttgcacctttcccgctccccgctgggtgctcagggtctaagtggagctgatcttggaattgaccttcttaaggtctggttgggccacggggctgtctgcaagcggctcttggccggaagacggcg

SEQ ID NO: 4 - DNA, 1831 bp, human
gccaacccactcccacgaaggacaaggacgtggcgggcagcccctctgcttttgtcaggcagtggtaggactttggtgtgggtggtgagaaattgtaaacaaaaactgacattcatacccaaagaaccagcctctcaccccagggtccatgtcccaggccccactccagtgctgcccacactcccagctgctggaggagaggggagatgccaaggtgccctgcaggacctccctccgggccacaccctcagctgcctcttcaggaaccggagctcattactgccttccctcccagggaggccccttcagagaggagaggccacaggagctgcattgtggggggacaggctcaagcaattctgtccccatcaaggggtcatctggagagacccaagaccctatctgttaccagggacccaaaatccaaggggatgcttccctctgccctctttcctgcccctccccatcatacctgcacccaccccagccagggctccctgtccagaattcggttctcctcaggacgccaactcccagagctaaggaccaaggagaagaacagcctctccacccccaagccaggcggttgaggaacatattgagaaaggttcagattgcagaaacccagccctgcccctgcctcctgcatccagcccccaacatggtgccaaagcttccagaagccaaaaagcttctgatttttaaggtagtgggcatctctctcctaatgacgaagctgctcagcaactccacctgcccgccgcaggaaggagcagtcccctgctatccctgcagccactcccagcacacccgcacacagccagcaccaccgcccccaccgtgcacttctcctctctgggccttggcttgggaccaggtacgaaggatccccaagcccttcaggcctgagatcagagccagatcagccttaagtcacctcccatccaagaacttggcctaaaaatactcccctatttctaaccctcaggacggatctgatattaaatgccttccctgggaggaagggtgctttccccctccctagaggtgcccattccataccctgggagactgaggagagcattggctgaagcccagttcctttcccatccatccccaactccaataatcccccactcctcgcaggtctcagtgtcatgctgtcttggggcagggtgaaagggtagtggcagcagggcgcccactctggagatcctcaaaaaaggccctcctctgtggctggcagcctctgacctttccctgggcttcaaaggaaggctatggagtttgctgtgggccctgcaaccttcccagccactcctgctgcactaaggacttaggatccttttataacaaagtccaccccgaattctgtctgcttaaactggaatacacaggagcccttcctggcctggatggtgtctcccagcttccccgcccagcttgcccaccccatagttggtgagatgccaagtttggtctgagttgtgaccccttcagagtagatgcccggcaggctggggttggcccctggagggtcaggggaccatcttcttattccctcttttctcattcctccaacttcctcccctccttcaattatttttttgtaaagttgatgccttactttttggataaatatttttgaagctggtatttctatttcttttggattttttttaatgtaaggttgttttgggggatggagttagaaccttaatgataatttctttcgtttggtgtaggttttagagatttgttttgtggagaggtttttttcttttgatgtaataaaatttaaaatggaaatgaaaaaaaaaaaaaaaaaaaa

SEQ ID NO: 5 - DNA, 1322 bp, human
tagcttggcacgaggctcgggtcgttgtggtgcgctgtcttcccgcttgcgtcagggacctgcccgactcagtggccgccatggcatcagatgaaggcaaactttttgttggagggctgagttttgacaccaatgagcagtcgctggagcaggtcttctcaaagtacggacagatctctgaagtggtggttgtgaaagacagggagacccagagatctcggggatttgggtttgtcacctttgagaacattgacgacgctaaggatgccatgatggccatgaatgggaagtctgtagatggacggcagatccgagtagaccaggcaggcaagtcgtcagacaaccgatcccgtgggtaccgtggtggctctgccgggggccggggcttcttccgtgggggccgaggacggggccgtgggttctctagaggaggaggggaccgaggctatggggggaaccggttcgagtccaggagtgggggctacggaggctccagagactactatagcagccggagtcagagtggtggctacagtgaccggagctcgggcgggtcctacagagacagttacgacagttacgctacacacaacgagtaaaaacccttcctgctcaagatcgtccttccaatggctgtgtgtttaaagattgtgggagcttcgctgaacgttaatgtgtagtaaatgcacctccttgtattcccactttcgtagtcatttcggttctgatcttgtcaaacccagcctgaccgcttctgacgccgggatggcctcgttactagacttttctttttaaggaagtgctgtttttttttgagggttttcaaaacattttgaaaagcatttacttttttgaccacgagccatgagttttcaaaaaaatcgggggttgtgtgggtttttggtttttgttttagtttttggttgcgttgccttttttttttagtggggttggccccatgaagtgggtgccccactcacttctctgagatcgaacggactgtgaatccgctctttgtcggaagctgagcaagctgtggcttttttccaactccgtgtgacgtttctgagtgtagtgtggtaggacccggcgggtgtgcagcaactgccctggagccccagcccctgcgtccatctgtgctgtgcgccccacagtagacgtgcagacgtccctgagaggttcttgaagatgtttatttatattgtccttttttactggaagacgtacgcatactccatcgatgttgtatttgcagtggctgaggaattcttgtacgcagttttctttggctttacgagccgattaaaagaccgtgtgaaatg

SEQ ID NO: 6 - DNA, 398 bp, human
gatgctggggctggtcctggccttgctgtcctccagctctgctgaggagtacgtgggcctgtctgcaaaccagtgtgccgtgccggccaaggacagggtggactgcggctacccccatgtcacccccaaggagtgcaacaaccggggctgctgctttgactccaggatccctggagtgccttggtgtttcaagcccctgactaggaagacagaatgcaccttctgaggcacctccagctgcccctgggatgcaggctgagcacccttgcccggctgtgattgctgccaggcactgttcatctcagtttttctgtccctttgctcccggcaagctttctgctgaaagttcatatctggagcctgatgtcttaacgaataaaggtcccatgctccacccg

SEQ ID NO: 7 - DNA, 6450 bp, human
gagttgtgcctggagtgatgtttaagccaatgtcagggcaaggcaacagtccctggccgtcctccagcacctttgtaatgcatatgagctcgggagaccagtacttaaagttggaggcccgggagcccaggagctggcggagggcgttcgtcctgggagctgcacttgctccgtcgggtcgccggcttcaccggaccgcaggctcccggggcagggccggggccagagctcgcgtgtcggcgggacatgcgctgcgtcgcctctaacctcgggctgtgctctttttccaggtggcccgccggtttctgagccttctgccctgcggggacacggtctgcaccctgcccgcggccacggaccatgaccatgaccctccacaccaaagcatctgggatggccctactgcatcagatccaagggaacgagctggagcccctgaaccgtccgcagctcaagatccccctggagcggcccctgggcgaggtgtacctggacagcagcaagcccgccgtgtacaactaccccgagggcgccgcctacgagttcaacgccgcggccgccgccaacgcgcaggtctacggtcagaccggcctcccctacggccccgggtctgaggctgcggcgttcggctccaacggcctggggggtttccccccactcaacagcgtgtctccgagcccgctgatgctactgcacccgccgccgcagctgtcgcctttcctgcagccccacggccagcaggtgccctactacctggagaacgagcccagcggctacacggtgcgcgaggccggcccgccggcattctacaggccaaattcagataatcgacgccagggtggcagagaaagattggccagtaccaatgacaagggaagtatggctatggaatctgccaaggagactcgctactgtgcagtgtgcaatgactatgcttcaggctaccattatggagtctggtcctgtgagggctgcaaggccttcttcaagagaagtattcaaggacataacgactatatgtgtccagccaccaaccagtgcaccattgataaaaacaggaggaagagctgccaggcctgccggctccgcaaatgctacgaagtgggaatgatgaaaggtgggatacgaaaagaccgaagaggagggagaatgttgaaacacaagcgccagagagatgatggggagggcaggggtgaagtggggtctgctggagacatgagagctgccaacctttggccaagcccgctcatgatcaaacgctctaagaagaacagcctggccttgtccctgacggccgaccagatggtcagtgccttgttggatgctgagccccccatactctattccgagtatgatcctaccagacccttcagtgaagcttcgatgatgggcttactgaccaacctggcagacagggagctggttcacatgatcaactgggcgaagagggtgccaggctttgtggatttgaccctccatgatcaggtccaccttctagaatgtgcctggctagagatcctgatgattggtctcgtctggcgctccatggagcacccagtgaagctactgtttgctcctaacttgctcttggacaggaaccagggaaaatgtgtagagggcatggtggagatcttcgacatgctgctggctacatcatctcggttccgcatgatgaatctgcagggagaggagtttgtgtgcctcaaatctattattttgcttaattctggagtgtacacatttctgtccagcaccctgaagtctctggaagagaaggaccatatccaccgagtcctggacaagatcacagacactttgatccacctgatggccaaggcaggcctgaccctgcagcagcagcaccagcggctggcccagctcctcctcatcctctcccacatcaggcacatgagtaacaaaggcatggagcatctgtacagcatgaagtgcaagaacgtggtgcccctctatgacctgctgctggagatgctggacgcccaccgcctacatgcgcccactagccgtggaggggcatccgtggaggagacggaccaaagccacttggccactgcgggctctacttcatcgcattccttgcaaaagtattacatcacgggggaggcagagggtttccctgccacagtctgagagctccctggctcccacacggttcagataatccctgctgcattttaccctcatcatgcaccactttagccaaattctgtctcctgcatacactccggcatgcatccaacaccaatggctttctagatgagtggccattcatttgcttgctcagttcttagtggcacatcttctgtcttctgttgggaacagccaaagggattccaaggctaaatctttgtaacagctctctttcccccttgctatgttactaagcgtgaggattcccgtagctcttcacagctgaactcagtctatgggttggggctcagataactctgtgcatttaagctacttgtagagacccaggcctggagagtagacattttgcctctgataagcactttttaaatggctctaagaataagccacagcaaagaatttaaagtggctcctttaattggtgacttggagaaagctaggtcaagggtttattatagcaccctcttgtattcctatggcaatgcatccttttatgaaagtggtacaccttaaagcttttatatgactgtagcagagtatctggtgattgtcaattcacttccccctataggaatacaaggggccacacagggaaggcagatcccctagttggccaagacttattttaacttgatacactgcagattcagagtgtcctgaagctctgcctctggctttccggtcatgggttccagttaattcatgcctcccatggacctatggagagcaacaagttgatcttagttaagtctccctatatgagggataagttcctgatttttgtttttatttttgtgttacaaaagaaagccctccctccctgaacttgcagtaaggtcagcttcaggacctgttccagtgggcactgtacttggatcttcccggcgtgtgtgtgccttacacaggggtgaactgttcactgtggtgatgcatgatgagggtaaatggtagttgaaaggagcaggggccctggtgttgcatttagccctggggcatggagctgaacagtacttgtgcaggattgttgtggctactagagaacaagagggaaagtagggcagaaactggatacagttctgagcacagccagacttgctcaggtggccctgcacaggctgcagctacctaggaacattccttgcagaccccgcattgcctttgggggtgccctgggatccctggggtagtccagctcttattcatttcccagcgtggccctggttggaagaagcagctgtcaagttgtagacagctgtgttcctacaattggcccagcaccctggggcacgggagaagggtggggaccgttgctgtcactactcaggctgactggggcctggtcagattacgtatgcccttggtggtttagagataatccaaaatcagggtttggtttggggaagaaaatcctcccccttcctcccccgccccgttccctaccgcctccactcctgccagctcatttccttcaatttcctttgacctataggctaaaaaagaaaggctcattccagccacagggcagccttccctgggcctttgcttctctagcacaattatgggttacttcctttttcttaacaaaaaagaatgtttgatttcctctgggtgaccttattgtctgtaattgaaaccctattgagaggtgatgtctgtgttagccaatgacccaggtagctgctcgggcttctcttggtatgtcttgtttggaaaagtggatttcattcatttctgattgtccagttaagtgatcaccaaaggactgagaatctgggagggcaaaaaaaaaaaaaaaagtttttatgtgcacttaaatttggggacaattttatgtatctgtgttaaggatatgcttaagaacataattcttttgttgctgtttgtttaagaagcaccttagtttgtttaagaagcaccttatatagtataatatatatttttttgaaattacattgcttgtttatcagacaattgaatgtagtaattctgttctggatttaatttgactgggttaacatgcaaaaaccaaggaaaaatatttagtttttttttttttttttgtatacttttcaagctaccttgtcatgtatacagtcatttatgcctaaagcctggtgattattcatttaaatgaagatcacatttcatatcaacttttgtatccacagtagacaaaatagcactaatccagatgcctattgttggatattgaatgacagacaatcttatgtagcaaagattatgcctgaaaaggaaaattattcagggcagctaattttgcttttaccaaaatatcagtagtaatatttttggacagtagctaatgggtcagtgggttctttttaatgtttatacttagattttcttttaaaaaaattaaaataaaacaaaaaaaatttctaggactagacgatgtaataccagctaaagccaaacaattatacagtggaaggttttacattattcatccaatgtgtttctattcatgttaagatactactacatttgaagtgggcagagaacatcagatgattgaaatgttcgcccaggggtctccagcaactttggaaatctctttgtatttttacttgaagtgccactaatggacagcagatattttctggctgatgttggtattgggtgtaggaacatgatttaaaaaaaaaactcttgcctctgctttcccccactctgaggcaagttaaaatgtaaaagatgtgatttatctggggggctcaggtatggtggggaagtggattcaggaatctggggaatggcaaatatattaagaagagtattgaaagtatttggaggaaaatggttaattctgggtgtgcaccaaggttcagtagagtccacttctgccctggagaccacaaatcaactagctccatttacagccatttctaaaatggcagcttcagttctagagaagaaagaacaacatcagcagtaaagtccatggaatagctagtggtctgtgtttcttttcgccattgcctagcttgccgtaatgattctataatgccatcatgcagcaattatgagaggctaggtcatccaaagagaagaccctatcaatgtaggttgcaaaatctaacccctaaggaagtgcagtctttgatttgatttccctagtaaccttgcagatatgtttaaccaagccatagcccatgccttttgagggctgaacaaataagggacttactgataatttacttttgatcacattaaggtgttctcaccttgaaatcttatacactgaaatggccattgatttaggccactggcttagagtactccttcccctgcatgacactgattacaaatactttcctattcatactttccaattatgagatggactgtgggtactgggagtgatcactaacaccatagtaatgtctaatattcacaggcagatctgcttggggaagctagttatgtgaaaggcaaataaagtcatacagtagctcaaaaggcaaccataattctctttggtgcaagtcttgggagcgtgatctagattacactgcaccattcccaagttaatcccctgaaaacttactctcaactggagcaaatgaactttggtcccaaatatccatcttttcagtagcgttaattatgctctgtttccaactgcatttcctttccaattgaattaaagtgtggcctcgtttttagtcatttaaaattgttttctaagtaattgctgcctctattatggcacttcaattttgcactgtcttttgagattcaagaaaaatttctattcatttttttgcatccaattgtgcctgaacttttaaaatatgtaaatgctgccatgttccaaacccatcgtcagtgtgtgtgtttagagctgtgcaccctagaaacaacatacttgtcccatgagcaggtgcctgagacacagacccctttgcattcacagagaggtcattggttatagagacttgaattaataagtgacattatgccagtttctgttctctcacaggtgataaacaatgctttttgtgcactacatactcttcagtgtagagctcttgttttatgggaaaaggctcaaatgccaaattgtgtttgatggattaatatgcccttttgccgatgcatactattactgatgtgactcggttttgtcgcagctttgctttgtttaatgaaacacacttgtaaacctcttttgcactttgaaaaagaatccagcgggatgctcgagcacctgtaaacaattttctcaacctatttgatgttcaaataaagaattaaact

SEQ ID NO: 8 - DNA, 817 bp, human
ggcacgaggggagctcaaatgtgtgtgtgtctctctgtgtgtttgtgtgtgtgtgtgcactcaagacctctaacagcctcgaagcctggggtggcatcccggccttgccattagcatgcctcatgcatcatcagatgacaaggacaaccctcatgacgaagcaacatgaattagggggcctcttggccttggtccaaaattgtcaatcagaaatgaacataaaggactccagagcagtgggactgtctgtcaaaagactctgtatatcttttgtggatgagttttgtgagagaacagagagaccattgtacctggcacaagggctcttcatgaaaagggagacttactgggaggtgcaagacagtggcatttctcctctcctcttgctgctcagcacagccctggattgcagccccgaggctgagaccagacaaagcccgggaggcagaaagatgctccaagaaccaacactatcaatgtctttgcaaatcctcacaggattcctgtgggtccagctttggaactgggaaacctttcttcggatccgcactcattccactgatgccagctgcccctgaaggatgccagtactgtggtgtgtgagtctcagcagccgcccacacgctcctaactctgctgcatggcagatgcctaggtggaaatagcaaaaacaaggcccaggctggggccagggccagaggggaaggccctggattctcactcatgtgagatcttgaatctctttctttgttctgtttgtttagttagtatcatctggtaaaatagttaaaaaacaacaaaaaaaaaaaaaaaaaaa

SEQ ID NO: 9 - DNA, 3062 bp, human
  misc_feature (2252)..(2252): n is a, c, g, or t
tgacgttcaagttcgcagggacgtcacgtccgcacttgaacttgcagctcaggggggcttttgccatttttttcatctctctctctctctctccctctatctctcttctctctctctctctccctctttttttttttttttttttttttttttttttgcttaaaaaaaagccatgacggctctcccacaattcatcttccctgcgccatctttgtattatttctaatttattttggatgtcaaaaggcactgatgaagatattttctctggagtctccttctttctaacccggctctcccgatgtgaaccgagccgtcgtccgcccgccccgcagcccaccatgtctcgccgcaagcaaggcaaaccccagcacttaagcaaacgggaattctcgcccgagcctcttgaagccattcttacagatgatgaaccagaccacggcccgttgggagctccagaaggggatcatgacctcctcacctgtgggcagtgccagatgaacttcccattgggggacattcttatttttatcgagcacaaacggaaacaatgcaatggcagcctctgcttagaaaaagctgtggataagccaccttccccttcaccaatcgagatgaaaaaagcatccaatcccgtggaggttggcatccaggtcacgccagaggatgacgattgtttatcaacgtcatctagaggaatttgccccaaacaggaacacatagcagataaacttctgcactggaggggcctctcctcccctcgttctgcacatggggctctaatccccacgcccgggatgagtgcagaatatgccccgcagggtatttgtaaagatgagcccagcagctacacatgtacaacttgcaaacagccattcaccagtgcatggtttctcttgcaacacgcacagaacactcatggattaagaatctacttagaaagcgaacacggaagtcccctgaccccgcgggttggtatcccttcaggactaggtgcagaatgtccttcccagccacctctccatgggattcatattgcagacaataacccctttaacctgctaagaataccaggatcagtatcgagagaggcttccggcctggcagaagggcgctttccacccactccccccctgtttagtccaccaccgagacatcacttggacccccaccgcatagagcgcctgggggcggaagagatggccctggccacccatcacccgagtgcctttgacagggtgctgcggttgaatccaatggctatggagcctcccgccatggatttctttaggagacttagagagctggcagggaacacgtctagcccaccgctgtccccaggccggcccagccctatgcaaaggttactgcaaccattccagccaggtagcaagccgcccttcctggcgacgccccccctccctcctctgcaatccgcccctcctccgtcccagcccccggtcaagtccaagtcatgcgagttctgcggcaagacgttgaaatttcagagcaacctggtggtgcaccggcgcagccacacgggcgagaagccctacaagtgcaacctgtgcgaccacgcgtgcacccaggccagcaagctgaagcgccacatgaagacgcacatgcacaaatcgtcccccatgacggtcaagtccgacgacggtctctccaccgccagctccccggaacccggcaccagcgacttggtgggcagcgccagcagcgcgctcaagtccgtggtggccaagttcaagagcgagaacgaccccaacctgatcccggagaacggggacgaggaggaagaggaggacgacgaggaagaggaagaagaggaggaagaggaggaggaggagctgacggagagcgagagggtggactacggcttcgggctgagcctggaggcggttgtgggcgtgggcgacgagagccgcgccctgcccgacgtcatgcagggcatggtgctcagctccatgcagcacttcagcgaggccttccaccaggtcctgggcgagaagcataagcgcggccacctggccgaggccgagggccacagggacacttgcgacgaagactcggtggccggcgagtcggaccgcatagacgatggcactgttaatggccgcggctgctccccgggcgagtcggcctcggggggcctgtccaaaaagctgctgctgggcagccccagctcgctgagccccttctctaagcgcatcaagctcgagaaggagttcgacctgcccccggccgcnatgcccaacacggataacgtgtactcgcagtggctcgccggctacgcggcctccaggcagctcaaagatcccttccttagcttcggagactccagacaatcgccttttgcctcctcgtcggagcactcctcggagaacgggagtttgcgcttctccacaccgcccggggagctggacggagggatctcggggcgcagcggcacgggaagtggagggagcacgccccatattagtggtccgggcccgggcaggcccagctcaaaagagggcagacgcagcgacacttgttcttcacacacccccattcggcgtagtacccagagagctcaagatgtgtggcagttttcggatggaagctcgagagcccttaagttctgagaaaatttgaagcccccaggggtggggtggacgcgtgccgcccagtcgacgtcagcgtggtctgtcatcctgctagtttgtgatgttttctgacagtagcctccaagaagccgttgtgcgaagacagagtcctgcagagtccttccagcctaggcctgcagcgccattttatttatattttttaataaaaagtaaaaacaaaaaaacagacccacattggaacagtgaatcagtcccatagagagggcccgtggaccatcgctgtcatgagtgatgccctggcccttctgaaaccagccaacctaattacctgtattgtggaaatgcgcatgagtccccaaccccttgtttctatacattctatgttgtcttttaaaaagtgtgcttaacattgacacaataaatgttggagctttagaaaaaaaaaaaaaa

SEQ ID NO: 10 - DNA, 536 bp, human
aacgtttgtttcatattttattgaatttcatttatattaaattaaaaatatatttctgacagattcatgtaacaaaaaggcagaacagttttcaaattgttcagctgggatgatcagtatggaatgaggcaaagcagttcgcattctataattgccttgtacaggtacaattctttcccaagagccaaaagaggatccttgagaactaacggaaaagcctaattacataaatgtaaaatactgtttctccctcattctcaaataacaacaggaatgagggaaaggaaggaggatgggtaaaaggttggaggagaagaaagaataagagaaagtatactaaaaatatgcctaacattaaaaaagttagtatgtgttaggtgcatgatccttcatcaataacatggaaaaaaatcaaaataacattacaccacacacaattggcatatcctattgtgtaagcgagtgcagaggttgaacacatcacaatagtgctgaacacagaatcacaagtaatgtcaaaatgataacttccaacc

SEQ ID NO: 11 - DNA, 3794 bp, human
ccaagttctacctcatgtttggaggatcttgctagctatggccctcgtactcggctccctgttgctgctggggctgtgcgggaactccttttcaggagggcagccttcatccacagatgctcctaaggcttggaattatgaattgcctgcaacaaattatgagacccaagactcccataaagctggacccattggcattctctttgaactagtgcatatctttctctatgtggtacagccgcgtgatttcccagaagatactttgagaaaattcttacagaaggcatatgaatccaaaattgattatgacaagccagaaactgtaatcttaggtctaaagattgtctactatgaagcagggattattctatgctgtgtcctggggctgctgtttattattctgatgcctctggtggggtatttcttttgtatgtgtcgttgctgtaacaaatgtggtggagaaatgcaccagcgacagaaggaaaatgggcccttcctgaggaaatgctttgcaatctccctgttggtgatttgtataataataagcattggcatcttctatggttttgtggcaaatcaccaggtaagaacccggatcaaaaggagtcggaaactggcagatagcaatttcaaggacttgcgaactctcttgaatgaaactccagagcaaatcaaatatatattggcccagtacaacactaccaaggacaaggcgttcacagatctgaacagtatcaattcagtgctaggaggcggaattcttgaccgactgagacccaacatcatccctgttcttgatgagattaagtccatggcaacagcgatcaaggagaccaaagaggcgttggagaacatgaacagcaccttgaagagcttgcaccaacaaagtacacagcttagcagcagtctgaccagcgtgaaaactagcctgcggtcatctctcaatgaccctctgtgcttggtgcatccatcaagtgaaacctgcaacagcatcagattgtctctaagccagctgaatagcaaccctgaactgaggcagcttccacccgtggatgcagaacttgacaacgttaataacgttcttaggacagatttggatggcctggtccaacagggctatcaatcccttaatgatatacctgacagagtacaacgccaaaccacgactgtcgtagcaggtatcaaaagggtcttgaattccattggttcagatatcgacaatgtaactcagcgtcttcctattcaggatatactctcagcattctctgtttatgttaataacactgaaagttacatccacagaaatttacctacattggaagagtatgattcatactggtggctgggtggcctggtcatctgctctctgctgaccctcatcgtgattttttactacctgggcttactgtgtggcgtgtgcggctatgacaggcatgccaccccgaccacccgaggctgtgtctccaacaccggaggcgtcttcctcatggttggagttggattaagtttcctcttttgctggatattgatgatcattgtggttcttacctttgtctttggtgcaaatgtggaaaaactgatctgtgaaccttacacgagcaaggaattattccgggttttggatacaccctacttactaaatgaagactgggaatactatctctctgggaagctatttaataaatcaaaaatgaagctcacttttgaacaagtttacagtgactgcaaaaaaaatagaggcacttacggcactcttcacctgcagaacagcttcaatatcagtgaacatctcaacattaatgagcatactggaagcataagcagtgaattggaaagtctgaaggtaaatcttaatatctttctgttgggtgcagcaggaagaaaaaaccttcaggattttgctgcttgtggaatagacagaatgaattatgacagctacttggctcagactggtaaatcccccgcaggagtgaatcttttatcatttgcatatgatctagaagcaaaagcaaacagtttgcccccaggaaatttgaggaactccctgaaaagagatgcacaaactattaaaacaattcaccagcaacgagtccttcctatagaacaatcactgagcactctataccaaagcgtcaagatacttcaacgcacagggaatggattgttggagagagtaactaggattctagcttctctggattttgctcagaacttcatcacaaacaatacttcctctgttattattgaggaaactaagaagtatgggagaacaataataggatattttgaacattatctgcagtggatcgagttctctatcagtgagaaagtggcatcgtgcaaacctgtggccaccgctctagatactgctgttgatgtctttctgtgtagctacattatcgaccccttgaatttgttttggtttggcataggaaaagctactgtatttttacttccggctctaatttttgcggtaaaactggctaagtactatcgtcgaatggattcggaggacgtgtacgatgatgttgaaactatacccatgaaaaatatggaaaatggtaataatggttatcataaagatcatgtatatggtattcacaatcctgttatgacaagcccatcacaacattgatagctgatgttgaaactgcttgagcatcaggatactcaaagtggaaaggatcacagatttttggtagtttctgggtctacaaggactttccaaatccaggagcaacgccagtggcaacgtagtgactcaggcgggcaccaaggcaacggcaccattggtctctgggtagtgctttaagaatgaacacaatcacgttatagtccatggtccatcactattcaaggatgactccctcccttcctgtctatttttgttttttacttttttacactgagtttctatttagacactacaacatatggggtgtttgttcccattggatgcatttctatcaaaactctatcaaatgtgatggctagattctaacatattgccatgtgtggagtgtgctgaacacacaccagtttacaggaaagatgcattttgtgtacagtaaacggtgtatataccttttgttaccacagagttttttaaacaaatgagtattataggactttcttctaaatgagctaaataagtcaccattgacttcttggtgctgttgaaaataatccattttcactaaaagtgtgtgaaacctacagcatattcttcacgcagagattttcatctattatactttatcaaagattggccatgttccacttggaaatggcatgcaaaagccatcatagagaaacctgcgtaactccatctgacaaattcaaaagagagagagagatcttgagagagaaatgctgttcgttcaaaagtggagttgttttaacagatgccaattacggtgtacagtttaacagagttttctgttgcattaggataaacattaattggagtgcagctaacatgagtatcatcagactagtatcaagtgttctaaaatgaaatatgagaagatcctgtcacaattcttagatctggtgtccagcatggatgaaacctttgagtttggtccctaaatttgcatgaaagcacaaggtaaatattcatttgcttcaggagtttcatgttggatctgtcattatcaaaagtgatcagcaatgaagaactggtcggacaaaatttaacgttgatgtaatggaattccagatgtaggcattccccccaggtcttttcatgtgcagattgcagttctgattcatttgaataaaaaggaacttgg

SEQ ID NO: 12 - DNA, 2514 bp, human
cacgagggtgaattctgccctggacagggctttgcccttggaggatccccaggtggccttacccgtgattcttactcggcatcctccattccccaaactccctcctccctgttaaatgtcaacctagacctggacctgggtgggaggaaactgtagcctgagtgtccacagggacacacgtgagccacagggctagaagcacaggcccgtcaccccaggaggaaaagcccagggtctggggcagcagagccatcgcatcatgtttcccagggcaacttgaggtctgacttttggctccctcgccctaagaggctcttcctctcttttgctcatccaccttcacaccacttgtgagctgacccccaggaacagcttggctgttccaccagagcagagggaatcattgctggactggatttcttctggagggaagcaccatgaattaaaggtgccagagctccatgcatggaaaagtggcctgttggttcaacgtggtttccttgtacttgatcctcctgaaatgagagattttcctgagatgactgagtatggagattaccaggcagatgataccgaaatgcttaaaggggctgtggctgaggctgtagcatctctgctggaggtgagacactctgggaactgatttgacctcgaatgctcctaaaagagaacttgatagcctgacagcagagaagtattatttggtggggagtctgagaaagcctggcttgtattatctgtccaaaaggaagcctcttcatctcctggtgccttggttgactattttggaaataggcatatcaaggttcctgattcagcactttgctcttttaataacaaatcgtccaaagatctcaaagtaagggtttttttttttagcttccactcttccgcagacttggtcatcgacctatttttgttgaagaatgaaaggcaatgacaagtttaacatatacaaattcgtgaattcttgttcattttgcattcctgcagtcagtgctaatccgtcgttcttaatcaggagttctgccaggtttaaggtcacctgcactcccagccaagtggtgatgtatgcctcccactctctgcaaggttttcctcatttttatattcatttattcatcattcattcattcacctaactttcattaaatagctgcaccatcccaggccctgtgcggatcgggaatacaaagatgagataaaacattgtccctgcccccgggggcttcacatgccactggaaacaacagactcttaaactaacaattcaagcaggcgccaagtgctacgacagaggtgtgaataaaagcatcaggaaatcggatggagaaccaccattcacccaagggtcagaggaggtttcaaagaaaaggtgtcattggagcagtgttttgcagaatgagccagagttcaccaagcaggcaaggcaaggaagggtgttgcagagagggaacagcatatgcaaaggcatatcagttcatggcatcacatctttcactggggaagccagtttccacaggcagcatcccaaggttcaataaggccttatttaacaagcaagcaaaatgcaaaccaaaccattattcatttattggcttaagtatgctttctcctgaaaactttagcattgggtgcaaatattcagtatggttctcggagtccaaagggttttaagccagggcacaaccagaaaagtggctctctttggtagggagaggggctccaatatttcgttctctccccatggggcactgacagagaaatgaaatagttttatctggaaaattccagagctattatttactccttaccaagggaagttacttcttgtaaaaacttttaagccatttatcaacaagttcttgttgactcagggcataatgagttcctgagacatgctcttttgggggctggggctttaggtagaagaatttcaaggaaaagaattctcagcagagctcaagattgtagaaactcagcagaagctggtaaaaacatggggagcccggaggacaggctgctgtccagggcagaggccatgaagaagtgcttccgtggccgacagtctggaaatgaatccatcatacattagtgccatagagtttagtaaccgtccagcaagtgtcatcacttttacagaaaacaaggtccagtaatagcaagtcttagtacatcctcacttttattataaatgggtgttttttcataatttttactgacgctcagtaaccatgcaaaattgtgtatagcattaatgtatctacatacctacacctatctatatataagctcatggtagaaaaccatagctaagtagcatcgcagacttaagcgtacaaagtgatcttgttcacaagtaatctgttgacagtgccaataaatgataaaaaaaaaattaacatgtcacaatgtaacggatgaccatatgcacaattccatgaattaaatctgtttcctgtgttagtcagtattcttaaataaaatttataattgaaaaaaaaaaaaaaaaaa

SEQ ID NO: 13 - DNA, 2112 bp, human
ggaagttaaagggaaaaagcaattcacaggaaagagtacaaagacagcacaagaaaaaaacagatttcataaaaatagtgattctggttcttcaaagacatttccaacaaggaaagttgctaaagaaggtggacctaaagtcacatctaggaactttgagaaaagtatcacaaaacttgggaaaaagggtgtaaagcagttcaagaataagcagcaaggggacaaatcaccaaagaacaaattccagccggcaaataaattcaacaagaagagaaaattccagccagatggtagaagcgatgaatcagcagccaagaagcccaaatgggatgacttcaaaaagaagaagaaagaactgaagcaaagcagacaactcagtgataaaaccaactatgacattgttgttcgggcaaagcagatgtgggagattttaagaagaaaagactgtgacaaagaaaaaagagtaaagttaatgagtgatttgcagaagttgattcaagggaaaattaaaactattgcatttgcacacgattcaactcgtgtgatccagtgttacattcagtatggtaatgaagaacagagaaaacaggcttttgaagaattgcgagatgatttggttgagttaagtaaagccaaatattcgagaaatattgttaagaaatttctcatgtatggaagtaaaccacagattgcagagataatcagaagttttaaaggccacgtgaggaagatgctgcggcatgcggaagcatcagccatcgtggagtacgcatacaatgacaaagccattttggagcagaggaacatgctgacggaagagctctatgggaacacatttcagctttacaagtcagcagatcaccgaactctggacaaagtgttagaggtacagccagaaaaattagaacttattatggatgaaatgaaacagattctaactccaatggcccaaaaggaagctgtgattaagcactcattggtgcataaagtattcttggacttttttacctatgcaccccccaaactcagatcagaaatgattgaagccatccgcgaagcggtggtctacctggcacacacacacgatggcgccagagtggccatgcactgcctgtggcatggcacgcccaaggacaggaaagtgattgtgaaaacaatgaagacttatgttgaaaaggtggctaatggccaatactcccatttggttttactggcggcatttgattgtattgatgatactaagcttgtgaagcagataatcatatcagaaattatcagttcattgcctagcatagtaaatgacaaatatggaaggaaggtcctattgtacttactaagccccagagatcctgcacatacagtacgagaaatcattgaagttctgcaaaaaggagatggaaatgcacacagtaagaaagatacagaggtccgcagacgggagctcctagaatccatttctccagctttgttaagctacctgcaagaacacgcccaagaagtggtgctagataagtctgcgtgtgtgttggtgtctgacattctgggatctgccactggagacgttcagcctaccatgaatgccatcgccagcttggcagcaacaggactgcatcctggtggcaaggacggagagcttcacattgcagaacatcctgcaggacatctagttctgaagtggttaatagagcaagataaaaagatgaaagaaaatgggagagaaggttgttttgcaaaaacacttgtagagcatgttggtatgaagaacctgaagtcctgggctagtgtaaatcgaggtgccattattctttctagcctcctccagagttgtgacctggaagttgcaaacaaagtcaaagctgcactgaaaagcttgattcctacactggaaaaaaccaaaagcaccagcaaaggaatagaaattctacttgaaaaactgagcacataggtggaaagagttaagagcaagatggaatgattttttctgttctctgttctgtttcccaatgcagaaaagaaggggtagggtccaccatactggtaattggggtactctgtatatgtgtttcttctttgtatacgaatctatttatataaattgtttttttaaatggt

SEQ ID NO: 14 - DNA, 540 bp, human
atccctgactcggggtcgcctttggagcagagaggaggcaatggccaccatggagaacaaggtgatctgcgccctggtcctggtgtccatgctggccctcggcaccctggccgaggcccagacagagacgtgtacagtggccccccgtgaaagacagaattgtggttttcctggtgtcacgccctcccagtgtgcaaataagggctgctgtttcgacgacaccgttcgtggggtcccctggtgcttctatcctaataccatcgacgtccctccagaagaggagtgtgaattttagacacttctgcagggatctgcctgcatcctgacggggtgccgtccccagcacggtgattagtcccagagctcggctgccacctccaccggacacctcagacacgcttctgcagctgtgcctcggctcacaacacagattgactgctctgactttgactactcaaaattggcctaaaaattaaaagagatcgatattaaaaaaaaaaaaaaaaaaaaaaaaaaaaaaaaaaaaaaaaaaaaaaaaaa

SEQ ID NO: 15 - DNA, 3050 bp, human
cagaccatggaactcagcgtcctcctcttccttgcactcctcacaggactcttgctactcctggttcagcgccaccctaacacccatgaccgcctcccaccagggccccgccctctgccccttttgggaaaccttctgcagatggatagaagaggcctactcaaatcctttctgaggttccgagagaaatatggggacgtcttcacggtacacctgggaccgaggcccgtggtcatgctgtgtggagtagaggccatacgggaggcccttgtggacaaggctgaggccttctctggccggggaaaaatcgccatggtcgacccattcttccggggatatggtgtgatctttgccaatggaaaccgctggaaggtgcttcggcgattctctgtgaccactatgagggacttcgggatgggaaagcggagtgtggaggagcggattcaggaggaggctcagtgtctgatagaggagcttcggaaatccaagggggccctcatggaccccaccttcctcttccagtccattaccgccaacatcatctgctccatcgtctttggaaaacgattccactaccaagatcaagagttcctgaagatgctgaacttgttctaccagactttttcactcatcagctctgtattcggccagctgtttgagctcttctctggcttcttgaaatactttcctggggcacacaggcaagtttacaaaaacctgcaggaaatcaatgcttacattggccacagtgtggagaagcaccgtgaaaccctggaccccagcgcccccaaggacctcatcgacacctacctgctccacatggaaaaagagaaatccaacgcacacagtgaattcagccaccagaacctcaacctcaacacgctctcgctcttctttgctggcactgagaccaccagcaccactctccgctacggcttcctgctcatgctcaaataccctcatgttgcagagagagtctacagggagattgaacaggtgattggcccacatcgccctccagagcttcatgaccgagccaaaatgccatacacagaggcagtcatctatgagattcagagattttccgaccttctccccatgggtgtgccccacattgtcacccaacacaccagcttccgagggtacatcatccccaaggacacagaagtatttctcatcctgagcactgctctccatgacccacactactttgaaaaaccagacgccttcaatcctgaccactttctggatgccaatggggcactgaaaaagactgaagcttttatccccttctccttagggaagcggatttgtcttggtgaaggcatcgcccgtgcggaattgttcctcttcttcaccaccatcctccagaacttctccatggccagccccgtggccccagaagacatcgatctgacaccccaggagtgtggtgtgggcaaaatacccccaacataccagatccgcttcctgccccgctgaaggggctgagggaagggggtcaaaggattccagggtcattcagtgtccccgcctctgtagacaatggctctgactccccgcaacttcctgcctctgagagacctgctacaagccagcttccttcccctccatggcaccagttgtctgaggtcacattgcaagtgagtgcaggagtgagattatcgaaaattataatatacaaaatcatatatatatatatgttcttgttttttgagacagagtctcacactgttgcccaggctggagtgcagtggcgtgatcttggctcactgcaacctccacccccggggatcaagcaactctcctgcctcagcctccctagaggctgggattacaggcatgcactaccacgcttggctaatttttgtatttttagtagagatggggtttcactgtgtaggccaggctggtctcgaactcctgaactcaagtgattcacccaccttagcctcccaaagtgctgggattacaggcgtgagtcaccgtgcccagccatgtatatatataattttaaaaattaagctgaaattcacataacataaaattagccgttttaaagtgtaaaatttagtggcgtgtggttcattcacaaagctgtacaaccaccaccatctagttccaaacattttctttttttctgagatggagtctcactctgtcacccaggttcgagttcagtggtgccatctctgtccactgcaacctccacatcctgggttcaagtgattctcctgcctcagcctctggaggagctggtatcacaggcgtcccccaccacgcctggctaaattttgtatttttaggtggtcttgaactcctgatgtcaggtgattctcctagctccaaatgttttcattatctctcccccaacaaaacccatacctatcaagctgtcactccccataccccattctctttttcatctcggcccctgtcaatctggtttttgtcactatggacttaccaattctgaatatttcccataaacagaatcatacaatatttgatttttttttttttttgaaactaagccttgctctgtctcccaggctggagtgctatggtgcaatttttgttcactgcaacctctgccttccaagatcaagagattctccagtctcagctcccaagtagctgggattacaggcatgtactaccatgcctggctaattttcttgtagttttagtagggacatgttggccaggctggtggtgagctcctggcctcaggtgatccacccacctcagtgttcctaagtgctgatattacaggcataatatgtgatcttttgtgtctggttgctttcatgttgaatgctatttttgaggttcgtgcctgttgtagaccacagtcacacactgctgtagtcttcccgagtcctcattcccagctgcctcttcctactgcttccgtctatcaaaaagcccccttggcccaggttccctgagctgtgggattctgcactggtgctttggattccctgatatgttccttcaaatctgctgagaattaaataaacatctctaaagcctgacctccccacgtc

SEQ ID NO: 16 - DNA, 873 bp, human
atggacattgaagcatatcttgaaagaattggctataagaagtctaggaacaaattggacttggaaacattaactgacattcttcaacaccagatccgagctgttccctttgagaaccttaacatccattgtggggatgccatggacttaggcttagaggccatttttgatcaagttgtgagaagaaatcggggtggatggtgtctccaggtcaatcatcttctgtactgggctctgaccactattggttttgagaccacgatgttgggagggtatgtttacagcactccagccaaaaaatacagcactggcatgattcaccttctcctgcaggtgaccattgatggcaggaactacattgtcgatgctgggtttggacgctcataccagatgtggcagcctctggagttaatttctgggaaggatcagcctcaggtgccttgtgtcttccgtttgacggaagagaatggattctggtatctagaccaaatcagaagggaacagtacattccaaatgaagaatttcttcattctgatctcctagaagacagcaaataccgaaaaatctactcctttactcttaagcctcgaacaattgaagattttgagtctatgaatacatacctgcagacatctccatcatctgtgtttactagtaaatcattttgttccttgcagaccccagatggggttcactgtttggtgggcttcaccctcacccataggagattcaattataaggacaatacagatctaatagagttcaagactctgagtgaggaagaaatagaaaaagtgctgaaaaatatatttaatatttccttgcagagaaagcttgtgcccaaacatggtgatagattttttactatttag

SEQ ID NO: 17 - DNA, 1051 bp, human
tcaagcatggctgaccaggcgcccttcgacacggacgtcaacaccctgacccgcttcgtcatggaggagggcaggaaggcccgcggcacgggcgagttgacccagctgctcaactcgctctgcacagcagtcaaagccatctcttcggcggtgcgcaaggcgggcatcgcgcacctctatggcattgctggttctaccaacgtgacaggtgatcaagttaagaagctggacgtcctctccaacgacctggttatgaacatgttaaagtcatcctttgccacgtgtgttctcgtgtcagaagaagataaacacgccatcatagtggaaccggagaaaaggggtaaatatgtggtctgttttgatccccttgatggatcttccaacatcgattgccttgtgtccgttggaaccatttttggcatctatagaaagaaatcaactgatgagccttctgagaaggatgctctgcaaccaggccggaacctggtggcagccggctacgcactgtatggcagtgccaccatgctggtccttgccatggactgtggggtcaactgcttcatgctggacccggccatcggggagttcattttggtggacaaggatgtgaagataaaaaagaaaggtaaaatctacagccttaacgagggctacgccaaggactttgaccctgccgtcactgagtacatccagaggaagaagttccccccagataattcagctccttatggggcccggtatgtgggctccatggtggctgatgttcatcgcactctggtctacggagggatatttctgtaccccgctaacaagaagagccccaatggaaagctgagactgctgtacgaatgcaaccccatggcctacgtcatggagaaggctgggggaatggccaccactgggaaggaggccgtgttagacgtcattcccacagacattcaccagagggcgccggtgatcttggggtcccccgacgacgtgctcgagttcctgaaggtgtatgagaagcactctgcccagtgagcacctgccctgcctgcatccggagaat

SEQ ID NO: 18 - DNA, 571 bp, human
  misc_feature (440)..(440): n is a, c, g, or t
  misc_feature (491)..(491): n is a, c, g, or t
  misc_feature (542)..(542): n is a, c, g, or t
  misc_feature (547)..(547): n is a, c, g, or t
tcacaacatacaaagaatttatttatgcaatacaggccttttctcaaatatttttcacagaattccacacagtaatctactagaaaagtagaattatacaccaccaaataacattgtttcgtttcttagtacaaattgctaatcaaaaggaaggtggagatcgatagtttaataacaaatagtaaaacaggtgttgctgaatacagcacccggtagcctctatttgcaaaccccgggagggaacgggggtgccccaacaacagtggctccgctcattgtccaggcacaggcaaaccgcagtagtgagctttggtacttgcatttactttaaaagaaaaacaaatgttgtgagctcaagagcatttccatcatttccgttttgttgtgctatgaagatgacagatcaggaaaaaatggtaactatttcacacttggctatnaattaagattccctgtgctaaccacaccattaaaataggcctcccccaaanccatacctttctagggcctaaaacatgcttgaaggaccaatattggattgnccagncttaattgagatggtttaaattac

SEQ ID NO: 19 - DNA, 3282 bp, human
gggacagggctgaggatgaggagaaccctggggacccagaagaccgtgccttgcccggaagtcctgcctgtaggcctgaaggacttgccctaacagagcctcaacaactacctggtgattcctacttcagccccttggtgtgagcagcttctcaacatgaactacagcctccacttggccttcgtgtgtctgagtctcttcactgagaggatgtgcatccaggggagtcagttcaacgtcgaggtcggcagaagtgacaagctttccctgcctggctttgagaacctcacagcaggatataacaaatttctcaggcccaattttggtggagaacccgtacagatagcgctgactctggacattgcaagtatctctagcatttcagagagtaacatggactacacagccaccatatacctccgacagcgctggatggaccagcggctggtgtttgaaggcaacaagagcttcactctggatgcccgcctcgtggagttcctctgggtgccagatacttacattgtggagtccaagaagtccttcctccatgaagtcactgtgggaaacaggctcatccgcctcttctccaatggcacggtcctgtatgccctcagaatcacgacaactgttgcatgtaacatggatctgtctaaataccccatggacacacagacatgcaagttgcagctggaaagctggggctatgatggaaatgatgtggagttcacctggctgagagggaacgactctgtgcgtggactggaacacctgcggcttgctcagtacaccatagagcggtatttcaccttagtcaccagatcgcagcaggagacaggaaattacactagattggtcttacagtttgagcttcggaggaatgttctgtatttcattttggaaacctacgttccttccactttcctggtggtgttgtcctgggtttcattttggatctctctcgattcagtccctgcaagaacctgcattggagtgacgaccgtgttatcaatgaccacactgatgatcgggtcccgcacttctcttcccaacaccaactgcttcatcaaggccatcgatgtgtacctggggatctgctttagctttgtgtttggggccttgctagaatatgcagttgctcactacagttccttacagcagatggcagccaaagatagggggacaacaaaggaagtagaagaagtcagtattactaatatcatcaacagctccatctccagctttaaacggaagatcagctttgccagcattgaaatttccagcgacaacgttgactacagtgacttgacaatgaaaaccagcgacaagttcaagtttgtcttccgagaaaagatgggcaggattgttgattatttcacaattcaaaaccccagtaatgttgatcactattccaaactactgtttcctttgatttttatgctagccaatgtattttactgggcatactacatgtatttttgagtcaatgttaaatttcttgcatgccataggtcttcaacaggacaagataatgatgtaaatggtattttaggccaagtgtgcacccacatccaatggtgctacaagtgactgaaataatatttgagtctttctgctcaaagaatgaagctccaaccattgttctaagctgtgtagaagtcctagcattataggatcttgtaatagaaacatcagtccattcctctttcatcttaatcaaggacattcccatggagcccaagattacaaatgtactcagggctgtttattcggtggctccctggtttgcatttacctcatataaagaatgggaaggagaccattgggtaaccctcaagtgtcagaagttgtttctaaagtaactatacatgttttttactaaatctctgcagtgcttataaaatacattgttgcctatttagggagtaacattttctagtttttgtttctggttaaaatgaaatatgggcttatgtcaattcattggaagtcaatgcactaactcaataccaagatgagtttttaaataatgaatattatttaataccacaacagaattatccccaatttccaataagtcctatcattgaaaattcaaatataagtgaagaaaaaattagtagatcaacaatctaaacaaatccctcggttctaagatacaatggattccccatactggaaggactctgaggctttattcccccactatgcatatcttatcattttattattatacacacatccatcctaaactatactaaagcccttttcccatgcatggatggaaatggaagatttttttgtaacttgttctagaagtcttaatatgggctgttgccatgaaggcttgcagaattgagtccattttctagctgcctttattcacatagtgatggggtactaaaagtactgggttgactcagagagtcgctgtcattctgtcattgctgctactctaacactgagcaacactctcccagtggcagatcccctgtatcattccaagaggagcattcatccctttgctctaatgatcaggaatgatgcttattagaaaacaaactgcttgacccaggaacaagtggcttagcttaagtaaacttggctttgctcagatccctgatccttccagctggtctgctctgagtggcttatcccgcatgagcaggagcgtgctggccctgagtactgaactttctgagtaacaatgagacacgttacagaacctatgttcaggttgcgggtgagctgccctctccaaatccagccagagatgcacattcctcggccagtctcagccaacagtaccaaaagtgatttttgagtgtgccagggtaaaggcttccagttcagcctcagttattttagacaatctcgccatctttaatttcttagcttcctgttctaataaatgcacggctttacctttcctgtcagaaataaaccaaggctctaaaagatgatttcccttctgtaactccctagagccacaggttctcattccttttcccattatacttctcacaattcagtttctatgagtttgatcacctgatttttttaacaaaatatttctaacgggaatgggtgggagtgctggtgaaaagagatgaaatgtggttgtatgagccaatcatatttgtgattttttaaaaaaagtttaaaaggaaatatctgttctgaaaccccacttaagcattgtttttatataaaaacaatgataaagatgtgaactgtgaaataaatataccatattagctacccaccaaaaaaaaaaaaaaaaaa

SEQ ID NO: 20 - DNA, 507 bp, human
tttgtttaaaaatgtgttttaattatattttcatgaattccaggaagaacatcattgcagttaatgttacaaaaaaaaaaaaacaaagagggacatctgaacatgcaataaaaaagtgaattcacagtgaaaataatgcatgtcagtactaaaatagagttgcttggttccctgaaggaaaagggtttcttctaattatctgttcacttggattttattatgagaaaatattctgtgaaagctttggggaagttttcaatttgtgctactattatcattagagtctgatggaagtccctcattctgaaagccgttgttcgcagtctgtaattcaatcagaaaattcaaaagtacaacaggtagtttggcaactcgcttcttgttacatacaaagccattagcaaaaatatgtaacaaaatttatgtaaaacaaacaattttgtccttatgtacaaaagacagccttcttcctcacaccctcacggcctattccaaaaagtgggaagg

SEQ ID NO: 21 - DNA, 897 bp, human
  misc_feature (332)..(332): n is a, c, g, or t
acagttcatccttttctactttatttatgttcccttgaaatgactgaccaggaaaaagatcatccttaaattttgaagcaagtgagagactttattaaaaatacatatatatctatataaacatatatgatagtggctctagttttatagagctccaagtgtattaaacatgacagccattcattcataaagatctggattgctttaccttgttaatattatctaggggaaaaagtgcaaattgctccatgttcttctctcccttatgtaacatctcctgagggtgtttagttgcatggctgttcagaaaggtattaagggcttaggccaanatcttactttgagtatgttaacaaaacacaaaaaacaggctgcggggctttcctggaagaccgggtgcttgaacctcggtccacgttcgttttaaactaacatcacacatacgttgaacaattttcctctgtcacatccagcaatcatggtcaccacgtacctggctacgaaccataatcttacacattgaagagtccatatcctagatccaatactatcaggttaatacttcgacacatgcaacgattcattgaggcagaatagaaagttggttccactgttacttgagaatgccaggtttccgggcattacaacgaaatcaggccttgtcatgcctacaatctggagattccactttcatcctacacactggcgcacttcctctttgacctccacggagtacctctgcccttttgggtcaattggtcttgaagcatgcattgagctatagcttgagtcaacagcgaggaggagagcgaaatccaccaacaagatctacgatgaatgtacaaaacaaaatggcgcgcgatactgggccaaactagtaatcatccacgcggagcg

SEQ ID NO: 22 - DNA, 803 bp, human
  misc_feature (619)..(619): n is a, c, g, or t
  misc_feature (778)..(778): n is a, c, g, or t
  misc_feature (785)..(785): n is a, c, g, or t
  misc_feature (797)..(797): n is a, c, g, or t
tggttttttttagttttaaaatattttcactttattattatgcttataatattattccaacagactgtattaaaggcagtgatcactaacacagaacacgacagggcgaagaggcagccgggccgattgcaggacgtggcctgtcgggccagggtcgctgacatgcacgctggtagctcatacactgctaccctcagcacaggctgcaggaattagggacaagacagatgccgccggactcttagaagctatttaataaatatcatccaaaaacaaaatggaaaagaaacaagaaaccctccgagcacaaccaccttaggccaactgaatgtaatctagtttattcaaccaaaaattgagagagaaggaaaatattgaaacaaacaaacgaaagaaagcagttcttaagactagcagtaaataaatttatacaacagttcggtctgtataatatgatgaaataaatctacatcttttcttattttggtgctttgaattatacatacaaacaacaattacagggacttgttcacaaagcatgtaggcctagaaaaggctctctgagaccctcaatggcaactggtgaacggtaacactgattgcccagaactggtatttnctttgcagaggccaacagctttgaacacatgattcgcctacaactatttgctttgtctgtcttttctgtttttgcttttgtctattatcttttaaggcaccaaacaactgtggccagtgaaaagaaacaaaaactgcagtctgtccatttgaatatcangactagntccttcctaatntcacac

SEQ ID NO: 23 - DNA, 1818 bp, human
tagtctggagctatggtggtggtggcagccgcgccgaacccggccgacgggacccctaaagttctgcttctgtcggggcagcccgcctccgccgccggagccccggcggccaggctgccgctcatggtgccagcccagagaggggccagcccggaggcagcgagcggggggctgccccaggcgcgcaagcgacagcgcctcacgcacctgagccccgaggagaaggcgctgaggaggaaactgaaaaacagagtagcagctcagactgccagagatcgaaagaaggctcgaatgagtgagctggaacagcaagtggtagatttagaagaagagaaccaaaaacttttgctagaaaatcagcttttacgagagaaaactcatggccttgtagttgagaaccaggagttaagacagcgcttggggatggatgccctggttgctgaagaggaggcggaagccaaggggaatgaagtgaggccagtggccgggtctgctgagtccgcagcactcagactacgtgcacctctgcagcaggtgcaggcccagttgtcacccctccagaacatctccccatggattctggcggtattgactcttcagattcagagtctgatatcctgttgggcattctggacaacttggacccagtcatgttcttcaaatgcccttccccagagcctgccagcctggaggagctcccagaggtctacccagaaggacccagttccttaccagcctccctttctctgtcagtggggacgtcatcagccaagctggaagccattaatgaactaattcgttttgaccacatatataccaagcccctagtcttagagataccctctgagacagagagccaagctaatgtggtagtgaaaatcgaggaagcacctctcagcccctcagagaatgatcaccctgaattcattgtctcagtgaaggaagaacctgtagaagatgacctcgttccggagctgggtatctcaaatctgctttcatccagccactgcccaaagccatcttcctgcctactggatgctacagtgactgtggatacgggggttccctttccccattcagtgacatgtcctctctgcttggtgtaaacattcttgggaggacacttttgccaatgaactctttccccagctgattagtgtctaaggaatgatccaatactgttgcccttttccttgactattacactgcctggaggatagcagagaagcctgtctgtacttcattcaaaaagccaaaatagagagtatacagtcctagagaatccctctatttgttcagatctcatagatgacccccaggtattgccttttgacatccagcagtccaaggtattgagacatattactggaagtaagaaatattactataattgagaactacagcttttaagattgtacttttaagattgtacttttatcttaaaagggtggtagttttccctaaaatacttattatgtaagggtcattagacaaatgtcttgaagtagacatggaatttatgaatggtctttatcatttctcttccccctttttggcatcctggcttgcctccagttttaggtcctttagtttgcttctgcaagcaacgggaacacctgctgagggggctctttccctcatgtatacttcaagtaagatcaagaatcttttgtgaaattatagaaatttactatgtaaatgcttgatggaattttttcctgctagtgtagcttctgaaaggtgctttctccatttatttaaaaactacccatgcaattaaaaggtacaatgcaaaaaaaaaaaaaaaaaaattttttt

SEQ ID NO: 24 - DNA, 3714 bp, human
ccgggttgctgtgcgactattctccgggagccgttcgtgtcaccgccggaacctggcgcaggttaattatagaaaatgccaagtaggaaatttgccgatggtgaagtggtaagaggtcgatggcctgggagttcactttattatgaagtagaaattctgagccacgacagcacctcccagctttacactgtgaagtataaagatggaacagagcttgaattgaaagagaatgatattaagcctttaacttcctttaggcaaaggaaaggtggctcaacttccagttccccttccagacgccgagggagtcgatcaaggtcacgctcccgatcccctggtcgaccacctaaaagtgcccgccgatctgcttctgcttcccaccaggccgacattaaggaagcaaggagggaagtggaagttaaattgactccgctgattctgaagccatttggaaatagcatcagcagatataatggggagcctgagcatattgagagaaatgacgcacctcataaaaatacacaggaaaaattcagtttgtcacaagaaagcagttacatagcaacacagtatagccttcgtccaagaagagaagaagtcaaattaaaagaaatagattctaaggaagaaaaatacgttgcaaaagaactggcagtgagaacctttgaagtgacccccatccgggcaaaggacttggagtttggaggagtacctggtgtgtttctcatcatgtttggcctgcctgtgttcctcttcctgttgctgttgatgtgtaaacagaaagatcccagtcttctgaatttccctcctcctttgccagctttgtatgagttatgggaaaccagagtatttggggtctacctcctgtggtttttgattcaagtcctgttctacctactgccaattggaaaggttgtagaaggaacgcctcttattgatggaagaagactcaagtatagattaaatggattctatccttttatcctgacatctgcagtcatcggaacatctctcttccagggcgtagagtttcattacgtgtacagtcattttcttcagtttgcacttgcggccactgttttttgtgtggtcttgagtgtgtatctctacatgcgctctttgaaagcgccccggaatgacctgtcgcctgccagctctggaaatgctgtctatgatttcttcattggccgtgaattaaaccctcgaattggtacttttgatctcaaatacttttgtgaattgcgccccggattgattggatgggtggttattaacttggtgatgcttttggctgaaatgaaaatacaggaccgcgctgttccatccttggccatgattttagttaatagtttccagcttctctatgtggtggatgctctctggaatgaggaagcgttgttgacgaccatggacatcatccacgatggatttggattcatgctggcttttggagacttggtgtgggttccctttatttacagcttccaagccttttatttagtcagtcatccaaatgaagtgtcttggccaatggcttctctaattattgttctgaaactttgtggttatgtaatcttccgaggtgcaaattctcagaaaaatgcattccggaaaaatcccagtgatccaaagcttgcacatttaaaaaccattcatacttcaagtggaaaaaatcttctagtttctggatggtggggctttgttcgccaccccaattacttgggtgatctcatcatggccttggcgtggtccctcccatgtggttttaaccacattctgccttatttctacataatttatttcaccatgttgcttgtccaccgagaagctcgtgacgagtaccactgtaagaagaaatacggcgtggcttgggaaaagtactgtcagcgtgtgccctaccgtatatttccatacatctactaatgctcttctggcttttctacaaaatactcctgcaattccagctgccatttgcaaaaacaggaaaaaaatccgaaactttcttttgttgcactgacagggtctgtacttttttttttctttttgagtcaggactatggagccgagtagttgatcttttaatatagccgtgtttacttgtattaacttacagttaacataggaaaaatacaagtaaggatgtgagaatttgcattttaatgggaaattttcaacccttaatctgaaaacagaagacagtcttaatataaatgtactgtgaagaatgctattgatgtttatggtttctgattacttttcaaattttgatgtttttttgccagttggcttttcttaaatgaaaacactgttccatttaaagtacatttatgttttattcagtaagagaatagaattttcatttgtttttctttaaatcctttactaattatataatttgaaagcaaaaagaagggcctatattaaatgctgaaagtgaaaagtgatgacattattagcagacactgcttaaaggagaccatttgtagcagttggcttaacctcaacttctaaaactacattgaaaatgtaaatacatagcttagttttttgtaatatatggtgacttcagatttttttgtacagtattttgaatgtgagatgattgtcaggactaactgtctttttaacaaaacattttcagtattttaaataaaattttgtaaagtaatgtgaattaaaaattttggaacaattagaattcattcactattgtatagaagatgctgttaaaacataggaagggtatttttcttgatccaaagtttgtgaatttggctttgctacctcaattgcaggtgtttgtttgcctttataaactgttgcaaatagaaaaaaaatagaataagtatatatttttggagtaacatcaatatttaaacatttttacacagatcggtgtttgaaaatttgccatttcaggctaatatttttatatatttttgactttttaaaagttcatcagtgtttttgctactgttaagcttatgcagtttatactgtattttttatgtatcctttatatttaccaaacctgactccctgtaaaggagtgctgtcttaaaaacaactgaaggggttaaagtcgtttcttttagtttaatagatgtgcataaggtagctttagcaattaaattctagtgaagttgatatagtctcatttttaattgtcctgtaatggaacagtagcaaattcactaaacttttgtgttcagagttaaattgttctcagtactttcaatgtaggggaatgtaataaacatagtgtgtatgtttgggttttaattacacattttatatatgagccatttagatatgcagtgttaattctatactgcatttgaagtgtatgtaacttagcttatgttaatgcagtcatgaagttggtttgctccagcatccggtagtctttaaacattcttttagtgaaattgtcattgttttatcagtgctaatgtgtgcaagcagtttttttattttgcttttctcctggcatcagaaagtggtggcgttttctgtactggattgcaccaaggaagcttttggggaggaaggaaggacattaaattctttccctggtaatgaaaagagccctttatcaatacagtgctgcaatttctggatatcagctacactttgtttttaagtttgtttttgacatgtttatttggcaaattttataatgaagttttaagttgaaaataaaatgtagcaaca

SEQ ID NO: 25 - DNA, 553 bp, human
ttctgagtatttgctgtattttatttgttcacatttagcctatttgaggttaacactacttcatttgacagtttaaaaatcatcctgtaaatagaataaaaaacaacagcagcaatagctaaaaaaaggacacaatgtataataaaataaaggaatgtgttgaaagaaatattccaaagaagcaaaggaaatgagaccatgattatgaattcaacaatcagaagaaaaaatcgtccaacatctgtaaaaagcaaaatcataacagtaataaaaaagaagcaagaattcaaagtgcaggtgcgctagctttcatttccacatccattcaggaaatagagcatactattcttttatataaagtgacaagttctgttttaaaacattcagttacattatcttgcagattttttttcagtttacattatctctacattgatttgatggaaagatggtcatatgcgatatgtggtataaatttcttcaatctatggagaatacggaaatggtaaagttgactgttttacttatgtttttgcagtaagaagctaaacat

SEQ ID NO: 26 - DNA, 216497 bp, human
gatcatgctgtacctgaaggccaacctacccatgacttcagttccatgggccaataaattcccatttttagttgaactgggttttctacaacttgtagctgctgaaaagtatctgatacagcccaaatcttgtattgaattgtaatccccagtatcagagatgggacctggtgggaggtggttggatcatgggggaggttttctcatgaatagtttaacatcatctccctgtactgtcctcacaatagtgacttctcgcaagagctggctggtttttttgtttttgtttgtttttgtttttttgaggtggaatcttgctctgtcacctggctggagtgcagtggtgcaatctcagctcactgcaacctctgcctcctgggttcaagtgattctcctgcctcagcttcccgagtagctggaactacagacatgtgccagcacacccagctaatttttgtatttttggtagagacggggtttcactatgttagccaggatgacctcgatctcttgacctcgtgatccacccacctcagcctcccaaagtgctgggattacaggcgtgagccaccatgcccagccaagagctggttgtttaaatgtgtgggacacctaactctctctccctcttgctcccactcttgccacatgatgcacctgctccccctttgccttctgccatgattgaaagcttcctggggcctccccagaagcagacgccactatgcttcctataaagactgcagaactctaagccaattgaacctcttttctttataaattacccagtcttaggtatttctttatagcaatgcaagaatggcctaattcagtatcctgacaaatataaacagtttcaacaatgtacccataagaaattcagttgactgtttttataaaggtctcataaccctactgttaccagtggagggtgtctaggatcttggtgttttgaatgaagaactggacaaaatgcacaaacaaagcaaggaaagaataaagcaacgaaagtacagatttattgaaaatgaaagtacactccagtgtggaagcagcctgagcaggggaaagcaaccaatcagaggttaaagtgaagttacaaagttgcacttctatgcacacgaagacttggccagcaatcagtctgattggttgcagacaacaaccaatcagaggttgaagtgaagttacaaaaattacactcctatgcaaacatatgattggttgaagaaagcaaccaatcagagatactttcaatttgccatttgccaggcagaaaaggtgtgggtttgcaaagggagtagcctctggtctttttgttacttaggcgtggaaagttggggttttccttttgatttagttctaggaagttagtgtgaattggccttaggttccctgcctccagaccctattctcctgcctcactacttgtgaggcgggaaattaaagaaagaaagaaaaataaaatttaaaaaggagaaataagctttcctgtattaggctgacttgccccagaggcagcaacaggcacagcccagacctaggaaaagtcttgatactatctaagaagccaggacacaaaggaatgtgccctggagattttcccagcactccctcaacatagggaggagaaaaacagattttcctttatcttacggtatgagtttatagattcctgttctctgtaactagtaacttgaagtattctcttttatctaagcagtggagtgaaggtcataaaccatctgagcaggcctgagatacagccacctggctgccatagtgaaggttatgggataagtctgtgctaggcactagaggaaatctagataacagacatctgggctgcatagcaatggtcatgtgtaatcctgagttatgaacctgtcacaacttgattaactgtctttgttctgcctctgtgtccttgcctttgtgccgctgtaagcctgcttctagctagcccaccccctttttgaagtgtgtatagaagtcaagtgctgtctttgttctgggcccagtttttggatgttaagtctgctgggtctgagtgcactcaataaagatcctcctgtatacaccccaaggtctctctggtcctcctgattcccacaacacttgttattatagtggattgtagaagagcaggaagtgggggttactcatcctccagctccatccatacttccacctctctccatagtttctgctagctgatcacctcaaggttatctgcccaaatgcaaatctgcagtgaagccccagagtctcctggctaagcatacaggtagggctaaagaacccacagtggaggacactggccaagaccagccagttttcttccaactgaaaggagccacagctaaacaaaagatagggaaacaaatccctatcttttggccagccctggcagaaagacagactttccatgggcagccgtgacagtttcctagctttggcatttctgcatgtccttaggtatgtcctccctaatcatatctatcaaccacctactgagacatcttcatttgtaaagtgatttattaattcagagagttcctgtgagcttcgagtgaaccctcacctgatcaatagaagttagacccagaatggcagaaaagcacggtgggagaggtcactgggatttggggcttggcttcaagttctggctctgctacttctgggctgtgttatttggggcagaatgcttactctttctgtgcaaggcagaatgatggcccactaaggatatccacgtcctaatccctggaacctgtgaacgtggcaagaggacctttgcagatgtggttaagggtaaggattttgagatgaggtgatgattctggattatccaagtgggtccaatctaatcatatgaatccttaaaagcagagaaatttcccagctgtggttgcagggagacacaactatggaagaaagttcagagagacacaacattgctgacttggaggctggaggaaggaagctagaaccggagggtgggtggtctctggaaattgaaaaaggcaaggagatggatttttcccccagagcctcctgaaaggaatgcagccctgccgaccttggattttagcccagtgagacacaagatgtgattctgacctccagaatgtaagataacaaatttagtagacctaaagaaagaagctgaggcaaaattaatatagagagtttatttgggccagtgttgaagacagcagcccaggacacacttccaagttgtctgggggagtgctccatccagcctttgttacaagcaggtttttaaagtggatacgcagttgtttgacaggcattctgactggattacagagatgacattgatccatgattggcaataccttgttgaatgatagagtaggagttatggtgtccagcatatggcattttatagctacttggcatcagtcagtctagaccccacacagcaagtggtttcaagaagtcattatctggctcaaagtgggagtgagacatggctgccatcacatgctgtcacacgtcagtgctctctgggctttagaaataagtgagctcacattcctcaaataaaaagtttcttttcagccaggcatggtggctaacacctgtaatctcagtactttgggaggccaaggcagaaggatcacttgaggccaggagttagggaacagcctgggcaaaaagtgaggccctgtttctattttttaaaaaaaattgttttaattagctgggtgtggtggtgcacacctgtggtcccagctacttgggaggctgaagcaggagaattgcttgagctcaggaggtcaaggctgcagggaactatgattgaaccactgcactccatcctgggcaacagagcaagaccctgtgtattaattcattctcacattgctataaagaaatacttgagactaggtaatttataaagaaaagagatttaattggctcacatttccacaggctgtatgggaagaatgatgctggcatctgcttggtttctggggaagcctcagaaaacttacaatcatgatggaaggtgaaggacaaacaggtacatcttacatggccaaagcaggagcaagaagagtgtgagtggtgggtgctattcattaaacaaccagatcttgtgaaaactcactatcatgagaacagtaccaaaggaatggtgctaaaccattcatgagaaactgcccccataatccaatcacctcccaccagcccgcacctccaacactggcagggacacagatccaaaccatatcattccacctcagcccttcccaaatctcatatccttcttacattgcaaaatacaattatgctttcccaacagtcttagcttattttagcattaacttgaaagtccaaaatccaagtctcttctgagagaaggctagtcccttctgcctatgagcctgtaaaatcaaaaacaagttagttacttccaagatataaggggggtataggtgttgggtaaatactcccattccaaaaaggaaaattggccaaaataaagtggttagaagccccttgaaactccaaagcccagcagggcagtcactaaatcttaaagctcaaaaataatcttttttttattccatgtcccacatccagggcatcctgatgcagggggtgggctcctaaggccttgggtagctccactcctgtggctttgcagggttcagcccctgcatctgctctcaagggctggcattgagtgcctgcggcttttctaggtacaaagtgcaagctgcccatggctccaccattccagggtctggagtttggtggccctcttctcacagctccactaggctgtgccccagttagggactcttcgtgggggctccaaccccacatttctcctctgcattgccctattagaggttctccgtaagagctccatccctgaagcaggcttctgcttggatatccaggcttttccatacattctctgaaatcttccaggcctcaactcttgcattctgtgcacctaccggcttaacaccacgtggaagccaccaagaattatggcttgcaccctctgaaacagtggcccaagctgtacctgggccccttttagccacagctggagctggagcagcagggatgcagggaacagtgttccaagctatcagcacttactttccttttagttatgcacatttctgcagccagcttgaattgctcccctgaaaataggcttttctttcctaccacatggccaggttgcaaattttccaaacttttacactctgcttccctttaaaatataagttccagtttcaggtcatttatttgctcacacatatgcacataggaatttagaagcagccaggtcacatcctgaacactgatgcttaggaatttcttccaccagataccctaaatcatcactctcaagttcgaagttccacagatccctaaagcaggggcacaatgcagccaggttatttgctaaagcatagcaagagtgacctttactccagttcccaataagttcctcatttccacctgagaccttctcagagtggtcttcattgtccataacaccatcaacactttggtcacaacaattcaacaagtctctaggaagttccaaattttctctcatcttcctgtcttcttctgagccctctacactcttccaacctctgcctgttatccagttccgaagctgcttccacattttcaagtatctttacagcaatgcccccctctttaataccaattgtcaggcctctgagtccaagctaagctatcatatgccctgtgacctgcacgtgtacatccagatggcctgaagcaactgaagacacacaaaagaagtgaaaatagccttaactgatgacattccaccattgtgatttgtttctgccccaccctaactgatcaatgtactttgtaatctcccccacccttaagaaggttctttgtaattctccccacccttgagaatgtactttgtgagatccaacccctgcctgcaaaacattgctcctaactccactgcctatcccacaacttataaaaactaatgataatcccatcaccctttgctgactcttttcggactcagcccgcctgcacccaggtgaaataaacagccttgttgctcacacaaagcctatttggtggtctcttcacatggacacatgagacaccaattttctgtattagtccattctcacattgctataaagaaatacatgagactaggtaacttataaagaaaagaagtttaattggctcatggctctgcaggctgtacaggaagcatgatgctggcatctgcttggcttctggggaagtctcagaaaacttaccatcttgatggaaggcaaatgggaagcaggcatgtcttcgaaggggatgcaggcacatcttgcatggccagggcaggagcaagaagagtgtgaggggggaggtgatacacacttttaaacaaccagatctcgcaataactaactctgtcacgagcacagcatgaagggaatggtgctaaaccattcatgagaaacagcccccatgatccagtcacctcccaccaggccccacctccaacattggcagttacaattccacatgagatttgggctgtgacacaaatccaaaccatatcaccctgtctcacaaatttctttttctttttaattaaaaataaagagttttggccaggcaaggtggctcacacctgtaattccagcactttgggaggccgaggcgggcagatcgtgaggtcaggagatcaagaccatcctggctaacatggtgaaaccccaactctacttaaaaaaaaaaatgcaaaaaattagccgggcgtggtggtgggtgcctatagccccagctactcaggaggctgaggcaggagaacggcgtgaacctgaaaggcggagcttgcagtgagctgagatcgtgccactctactccagcctgggggacagagcgagactctgtctcaaataaataaataaagaaaataagaagtttctgttatttatcaatttatattgtttagccaccagatttgctctaatttgttacagcatccaagaaaactaatacaaacactgagccttgtctccctcctctgtaaataggaggtgtagccctgacctccatggaatcatctgaaaactagaggctgtgagcttggtcctgaaatcacgaagtcctgggttcaaatataggattacagaggggccccactcttctcttgccaggccgggcaaggggctccgccctctgcctgccacaggaagcctgccccgtgcctcagcgaggaagcctgagttttaggttggtgcaaaaataattgcggttttgccattacttctaatagcaaaaactgcaattacttttgcaccagcctaatacttggccttgcacgtccccattccttctttcagacctttgaccttgagctgcctcaccctggccagggccaaagcagtaggattaagggagagtcttgggagagagcggaagaaacaagggcagggccccaggtcctgaccctgaggcaggtgcagcctgagcgttgggggagggatgagccctacagggcgcagctgcatgggcgccttctgcttctggctgtgggattcgcagaaaggcagctaacctccctgagcctgttactccacctggaaaacggggaagagaagttctagaaatagctcccattcctaggcatcctcctcttctctctttcttactccttccctttcttcgctattgttattattaatcatgagttttaccacgaccccataaggaaactgggagcttggagagcttaacttgtcaaagtcacggagcaggcaaacggctcaggtgggattcgaacccaaagcccatggtcgcacttctaggccaagctgccgcaaatgtgcaggatgcccgtgaccaccgacaaacacgggctcgctttggggagctagacctccgcgaagagggaggtggggcctttgggttatagggaggggccaccgcatgtccccagtccctcctgcaggtcacggagccaatgggctccggagtttctcccgcgcccgggcagcgcgtggagacctggcttgtgattggagctcgggggccaggggaggtggctcgggatgcgaacgcgcagtttagtgactaacgcgctcgcagcctgcgctaatcccggctattaccgcgctaatccctcgctgcaggctcactcccgggccgggccgggctgtcacgggtcagggcccggcggggcgcgcctttctcaccctgctcacgctacgaacttcacccctccccaacccccgggcccgagcgggaagggcctccggagttctcttggtccaggcccacgttcccatgtcacagatgggaaaaccgaggcccagcgggaaggaacttccccagggccagcagagctggacttctctatggccgccctgaacagccggctgcctgactgtcatcaccttgtcccctctggaataaaggaggtttttgaggacaaaactcgtgccctagcgctgtggccggggcctggaacatagtaggtgttgagttgtaaaggaatgaatctggccctttggagtcagcccagaacgccatattgaaatggtgaaaaggacaagactatggcctgaaggcaagtggagaagtgaggggtgaaatattctgcaaggtatagaatagacagtaaaatatgcctctgttatagaatatttgctggaaatacagctcctagtgttctttggagtccttttttctttctttctttttaacattttttgctatcactttgcaaaatggaaactcctatgaaacttccacatgaagcactgggctggcagtttgcttacgtatttcatttaatcctgtgagctagagatcacattgtccttgttttacaaatgaggaaactaaatggaatcagaagggttaagtcacttgcccaaggccctgcagctagaaatagatggagctgagatttgaacctcagtccacagagttttgttttgttttgttttgttttgttttgttttgtttcagccgaattgaactaaatgtctgcttagagctttcagactcgaggttctgtggctctgctgcaatatttaatatttttgaattgatctttttgaaaaaggccaaatctgctatgctatggttcttcagtctgttcccagcctctgtgcccaggcatcacaaagctaccaggagaaggcaccactctgatttcctagcctcctttggagtctgttcttttgcagaaaaatctcccctgaaatgtgcaagagttttcgcaccaaacagccacttgtctcattttaatagagtcccaaaattgacacttgggagaactgggtaatgcaactcagttccacagacctttcctgatattgtgtgacagatactgttctgggactggagacagagcaataaataagaccttgcatgctctgcccctcagattccccacgcgtacaaggttggagatggcagagatggcatgcagacccattctctccctttcattaatgtgcatgcaagcatgctcccttccagcactcatggcagatattgctcattgatcatggcacactttcctgctgaaacacatttcagcctcaagtacctaactcccaggattggttgaagccaggagttcaagaccagcctgggcaacatagtgagacctcgtctctacaaaagtaaaaaaattagcctggcgtactggtgcgcatctgtagtgatagctacttaggaagctgaggtgggaggatcacttgagcccaggagtttgaggttgcagtgagccatgatcaagccactgtactccaacctgggtgacagagtgaggcactgtttcttaaaacaaaactagcagtccccaagcaccaagggtagaggtgctagggaagatgaaatattttgtcctctccaaactaaggtagctcaggttctccctagctttgccattcagcccaatattctccaattctcccagggttccagccctgtggtttctctgctcctggaaaagatcctcccccatgatgagtgacactactgagacaagccagagagacatggggcagagcctccttctgcctcttcccttgtggtacaaaggaaggatgcttaacaagccccctgaagacctgttcctcccaggcagtgccttctagcagcactatctcctatcccttcctaaggaggctcagccctcctgcaatcaaacagcagccacctccccaggaccacattggctcaagacaaagtggggaaaggaaagaagtaatggaagtgttgggtcagccagacaagaatcccataggactgtggtttccccatatccattatgctgttatctccaagcctttgcatatgcagttccctctgctatgacagtaccccctgcacacacacgccccccaccccccaccttctccggccttgtctaacgaactcctattcagttcttcaaaccctagtcagatgacatctcctctgggaagtcttccttgccctccctctagacggtcacccacttcttcttgggtacatctgtgcctgtgcacacatttgtttcttgtagccactatagtgatttgtgtacttgtctctctccttctctggactgtaaactctttgaaggcagaaccatgtcttattctatcaggatcctcaccatcctggcacagacagggaactcactaaatatgtgtggacctgttgattaaaaccctaccacctgaaaagctgaaaacacaccaagctgatgagccaaagacaaacctcattatccccaatttgcaagtgactcagctcagccaaagagacatgccgaaaagtcatctgctcataccactggccaagtcagggcaagaacctaagagtccaagctcctcagcattccaaggaggggaaatggtccctccctttgatcctgcatatgagatggccaactctaagtgtccattaatgatttttcactgtttatattgcaaagctggaacacttcacccaggtggctacagctaggaacttacacgatcacagttaaaagtttgcaccatttatttcagcaaacaccttttacgaatcaaaagacaagggcagggatggtgcctcacgcctgtaatcccagcactttgggaggccgaggcaggtggatcacgaggtcaggagaccaagaccatcctggccaacatagtgaaaccccatctctactaaacatacaaaaattagttgggcatgttggcgccccagctactccggaggttgaggcaggagaatcgcttgaacccgggaggcagaggttgcagtgaaccgagatcgcgacactgcgctgcagcctggtgatagagcgagactccgtctcaaaaaaaaaaagaaagaaagaaagaaagaaaaagaaaagaaagaaagaatcaaaagacaaagtgttaatattcttaataaacaaggaaaccttatagataaatgagtagtaactcagtaggaaaataggtaaaagtcacaaagaggcaagccacataatgtaaaatcaattcaacaatgattcattgagccactactgcatacgaggcatggctctagacactggaggtacatgatgaacaagacaaggtccctgttctcatggaatggcctagtgaggcgaaacaggcaagcaaataaacatatatctctcctatggcaggtatatggagcaaagtaaaatagggtgatctgatagaggtgacacagctactctagaaggggtggtcaggaaaggtcttgcaaggaggtgctgataactgaatgccaagaatgggcagccatgcaatggccaggggggaaagccttccagaggagggaccggcaaagatagtgcaagatctccaagaaggagtgagccaggaatatttaagaagctaagaggaggccagcgtggctggagagaagtgggcaaggaggaaagtgtagagtacgggaccggctggagcgtgcgggactgtaagcgggggacagagttgagatttgagtgaggcaggaagacctgggagattttaagcaggagaagggtgtgatctggttacgttttcaaactatcactttggccactgtgtggagagtcgacaaaaatgagagcagaagcagggaatccagttaggaggcccctgaattagcccaagggagaattgacaaacacttggcataaagtggaaagggtggaggtggaggtgcaagcattcaggatgttttagggatagaaattgatgggatttgctaatcatggactggaattggggatgagaggaaactaagtctcaaggaaactgtgtatacatattttttgccttgaaaaattggtgggtagatggtggtacttcttcttaggtgggaaaatggcagaagatgggcaggagctggtttggagagaagtttcaaaataatagtaagagctcacatttaccaagtttttcctctgtgcctggcttgctttacatcagggagttctcaatctctacgttgttgctatttgagatgagatcattttttgctgtggagttgtcctatacattgtggggtgttaagcaacatctctggcccctacccactagacaccattagtgtgcatgcaagtatacatgtgtgagcgtacacacacacacacacacacagagagagagagagagaaagagagagagagagttggacaaccaaaaaatgtctccagacactgccaaaaggcccactcatcattcctggtgagaacactgctctacatggattctcttctgtaatcctcacaaccactctataaagtccatgctgatagtatccccattttacagatgtggaaactgaggcccagaatacttaacttatccaaagtcatgagtctttatttttggccaagttgggcttgagtgcccactgaccattgctacggtataaatgtgtctctctgaaattcatgttggaacctaagacccaatgtgatagtattaagagacgggaccttcaggatgggattagcatctttacaaaagggcttgagggagttgatttgccccttccaactcttctgtcatgtgaggacacagcaagaaagcaccatcttggaagcagacagcagtcctcaccagacactgaatcttctggcacctggatcttggactgcttggcctccagaactgtgagaggtaaagttctgttctttatatattacccagtctcaggtatttttgctacagcagcacaaacgcactaagacaaccattcatgaagagagctccaacaggcaggtgtgtgcatgccactgaggtgcaggggagtgtcagggtgaagagggaatctgcaattgggagtccctggtgcctggatgggactttcactgtggaactgaatgaggtcacctaaggagaatataccatcccctctcttcttttgaaaaacttcatttctcctgttatctctgctttctcttgcattaccagtttctctcttttccgaatcattcccataagcaaacatagagcgtcactgttccttggtgtcacctccccctccagtgcctgcccaatttctccactctctttcatagcaaaattccttaaagagttggtacaatccgtctcttcaaaatgtcacctctcattctctcctccacccactctaacaaagcattcatcccaacactcaactaagacctccaggccatcaaatccaatggtcactcctctgtccccatcttactggccctcttggcagctttggacacagttgtcctccctccttcttgaagcatcttctttccttggcttccatgacaccacactgtctcggctcctcctctaagtgtagaaggggcctagggtctggtcctagcccccttcgcttccctatttacatgaaagaaaaaatatggatggccagtacacattgaaaattgtgctcagctccaattataaccaaagaaatgcccactaagacaaatgagatctacttttaatctaacacgatagcaaagattcaaaagattaattatactcagtattggcatagatatagagaaacaaacactctcatttgccattggtgagaagataagtagtaccatctttttttagaaggctttttctcaatattgatcaagagacatataaaatagaatgatcaatcctatactttgttttaatcttttctattgacataatttcagacttacagaaaaactgcaacaataatacaaagaattcccagataccctacccatcatccacatcacctagattccccaaatatcatcttactacactaggattctccctctccctctctctctgtttctctctctcttcccaaaatatatatatatacactcacacatgtatgtatctgtgtgtgtatatatacacatatggatatatgtacatacatacacatacatatggatatatgtacatatgtatgcatacatacgtatatgtgtgtatatatacacacatgtgcatatataatagttttatacttttatactacatatgtatatatttttctgaaccacttagtggcaaattgcaggcatgatattctttaccataaatacttgagtgtatatttcctaaaagtatggaattatcttagataaccaaagtacaagaatcaaagtcaggaattaacactgatacaatactactatctaatccacagatctccttgggatctcaccaattgtcaacatggtgcccgttttagcaaaagtaaatccaatatcatatattgcctccaatcattatgtctctgtagtttcttttaatgtggaacagttcctcagttgtctgtttcatgactttgtcatttttggaatccaggcaagttattttatagaatgtccctgagtttgagtttggtagattcattctggcataaacacttttgtcttactcttccctctgcctggaatattggtttcttggcttttcaagctgctttcttctcctcctcctttgagtctcccttcaaatatcaccccttccaaagagccttcctactaaatagaattacagtcaattctcagaaaaaaaaaattggccaaatgatcaagaaatgtgatgttttagaccaggggtcggcaactaccgtgaatgaactaagaatggtttttacatttttttttaatggttggagaaaaaaaactgaaagaagaaaatcttgtgacattctcatgaaaattaaatgaaattcagttttagtgtccacaaataaagttttatggggacacagccaggcccgtgtgttacatttatctgggctgctttcctgctacaatggcagagctcagtagtaggcaccgagagtcactgctctcatctctttgtgtggctgctcagcacactacgaaccacatgccacagctccaagtcgacagcatgcacatcgctgtggggcagtattttctttttttataaccagtgcatacacgtcatgtcaaaacaagaagagtggacttccaatgttgtactttttaaaaatacatgataatcatgtggcaaaatacacgcaacataaaatttaccatcttctctatttttaactagatagctcagcagcgttcggtacattcacgtcattgtgcaaccatcaatgccatccgtctccagaactcttttcattttgaaaaactgaaaccctttacccattaaacaagaactccccattctcccctctcctccagccccaggcaactaccattccactgtcaaaaaataacatttcaatgaattgagttgactcattggcttttattattgattcattaattaggcagcatcccattgatgaaatagaaaaagacatcccaatgagaagagggggttgtctttgggggcacaaagtggcagaaggggaacagaaacaaggaacaaagagtagactgggcatttcaaagttacttttcttgtaggatgaaagcagaggggacttccttatcacatcagctcaggttgactgggaccttctctgctggttgctgtaaatctgtttgttttttttaaagctgactgttttaagggtcagtttgattacgtggcacctaacatgagtgactccactctggggtctagtacaggagcttagtccaaaacaatggcctccagtaaattttatttcaccctactttctgtctctatgattttgactagtctaagtacctcatagaagtagaattctatgatatctatcctttggtgactggcttatttcattgagcatgatgtcctcaaggttcatctacatcataccatgtgtcagaattcccttccttcctttcttttttttttttttttgagatagagtctcgctctgccccccaggctggagtgcaatgacacaatctcggctcactgcaacctccgcctgccaggttcatacgattctcgtgcctcagcctccgaagtagctggggttacaggtgtgtgacaccacacccagctaattttctgtctttttttttagtagagatggggtttcaccatgttggccaggctggtgtcaaactcctggcctcatgtgatccacccgcctcagcctcctgaagtgttggccactgcttccagccattccttcctttttaaggctgaataatattctatgtatgcatataccacattttgtttatctatttatccatcaatggtggagtgtcacatttttaaggcccagcgaagtgtgcattattttgttatccagttagatagcaagacattgtgcttattaggcaatgacactgcatctgtgccaaaagattttaatacatgtctcgctccataatatctaaaatatttactctctggctgtttatagaaaaagttggccaacccaattcttgttttaccctggcttcatagcagtcatggaactggacctgtagtcccacttagttgcatgccaacaaataccaactcaaatgctcaaacttttatctgaaactttgtgtgggcttccctgcaaatgcacttgactgtttcctcccagcttttcccgttcaaacctgactcagaaccacccctaacccccatctccacccacaagccaggcctgttgctatggtttgaatatttgtctcttccaaaactcatgttgaaatttaatccccaatgtggctgtactgagaggtggggcccttaagaggtgattgggtcatgagggctctgcccttatgaatgggttaatccagtcatggattagtgaattaatgggttaataggtaacccatcaattgatccattaagtgatcatgggagaggaactggtggctttataagaaaagcaagagagggctgagctagcctgtgagcactcagcttcttcaccagctgatgtcctgcaccactatgggactctgcagagagtcatcagcagcaagaaggacctcaccagatgcagccccttggcaatggacgtctcagcctccataactgtaagaaataaattcctttctttgtaaattatccagattcaggtattctgttataagaaacagaaaacagactaagacacctgtcctttcttgcccaaacagtctttctgtaaatacttcctgatgcctcttctgtacccagcccttgggaagttgacatgagaggcagggtgatacttatgcacccagacctgtccccctgccttccccacccacatgctcagcaccttcctgaaattaatcatagaatcttcagattacatgatctgaagtgctcagactctgcagaaggtgtgaattatacaagctctgagcttttaagttctcttaagctttttgtttctttttctttttttcctttttatttatttatttatttatttatttatttatttgagatagagtctcactccctctgttgcccaggctggagtgcagtgacatgaccttggctcactgcaacctccacctccccggttcaaacgactcacatgcctcaacctcccaagtaggtgggactacagccatgtgccaccatgcctggctaatttttgtttttttagtagagatgggttttcactatgttggccagcctggtcttgaactcctggcctcaagtgatccacccgcctcagcctcccaaagtgctgggattacaggcgtgagccaccgcacccagctctcctaagtcttttagtataagtttagaatggaagaaatgcaggaacttaggccctgaaaatgttagaattagggaatcttagggtgctaaattgttaaaatataaaaaccattaaaatggtggagttatttaaccagaatgtgttaaacttgcagattcttagaaccatggaaaatcagaatgtcctgggtggaggggatcttctagaagccaggaacacatgtcctatctggggcacaaatcccttctgacccccagcagccttcttctccctgcctgattcccgtccaagggtcttattgctcaggcatgctctgagcttcctagctgctgcgaccttgtcttctggccactggctgctgcccaaggtgcttcacagcccagccctattttccttccaccctctccatccactccttaaagacaccagaagccagacctgtcttcctgccttgctcccgtggtctcctctgcccagcttgcccttcccttcactcctcacctccccacctctccctgttgagaggctagccccttgtcaagggtctccccaaacatcacctgcacagggatgtgctcctgtgttcctgagtggctgtcacagccctcctttatcctcatgcctacaaatcacctcatgtctgcaaatcccttcaagtcttagagcctcagtctcagcttctgtcaaatgagaagaagaaaagtacgcccctcaacgggttgttgtgggaatgaaattcggtaacacagaaaatacttagcccagggcctgacacaggagaggtgctcagccaacatgagctaaagacctcaggaggcatgctggctccagagccctggctggttgcaccagatcagggcatccatgggcaaatgcagaaccaactgaatgagctgttgagcctcagcccaggaagaagggaagtgtgcacctggcagggaggtgcccatccaggacgaatccctgaaagaggatggattgcttctgccaggaactatttggatgatggaggaagatgagggtgagatgtggggaggggtcagcacgtgatttcatcccagcactggagtaagagacacatggtggtgggcggagtcaatcatcaagccagtgtcagtcattgagcccattgaggggttaagagctttgtcctgaaagtcaagaaaggaaaacaaggaaaagaaccatgcatttgttgagcacttactgtttgcctggtgctgtgctaaacacttgacgtgttctggtttggttcacaccaaagctagcatcgggactgaaagtgtaacagaagagccaggtagaccgggttcgaattccagctctaccttgtgctggctgtgtgaccttgggcaggtcgcttcccctctctgagcctcagtttcctcatctgtaacgtagggtagcaaaggaaaaaacttttccttctgtccttctaggttcttgattggagcccctgtaataaaaaacagattaacaaggaaaaagcacacaaatttatttaatataaattttacatgacacaggagacttcataagaaaatgaagacccacagaagcggttcgagctaagcctttttttgctgggttggatgaagggtggggagtcatgggaaaatgtgaaggacagaagaatttgagctaagggcagtgaactgggaacacccagcagggtggcttgtttggattcctctcggcattcctgtccctctatcttcagaggtgaagatgcttctttcctccaggtacagggagggctcctctcacctgaaggtcttgtgatctgcttcagaggaaagctcggagagtccttcctgcacccgccgtttctcaaattctttcagtttcaaatattcaatatccaaagcaccatattttggggtagtacattctgaatcctctcaacagggataataatattaggctaaaccaggtaaatttgtcaacatttgactctttggacctataataatggcagtttcacacagatctgtcctggaaagttttggggagaattacagtaattaatccatctaatctccttagctcagtgtctggcacatagtaagtgctccataggcagtagctcttcttatttatttatagtcctcatcctcatgtaatagattttaaaaactgatgctcagagaggttaggtaacttgtgcaaggccagccagctggcaggcggccgagcaagggttcaaacccagatgtgactgggcgctgtggctcgcgcctgtaatcccaacactttgggaggccaaggtgggtggatcacttgaggtcaggagtacttgaccagcctggccaaaatagtgaaaccccgtctctactaaaaaaatacaaaaactagctaggcgtggaggcgctcatctgtaatcccagctactcaggaggctgaggcatgagaatcgcttgaatctgggaggaggaggttgcagtgagccgagatcacaccactgcactccagcctgggcaacagagtgagactccatctcaaaaaaagagaaaaaaaaaagactaaatgcaagcccagtgccccaatctcctttctggaggggagcttcatctctgcagggcaggcagggtacagtgccgagtctgtgcagctcaggcccgccttcccctgctgcctaccagatcctgagggttggggctcgtgttaccctatttccattaaccattggctgggtcccccttcccctccagatcccttgcttcagggccctgacccacagccacctgagaggcacgtgacaatggtgagtgctgggttgccctgggagaggatggaggggtcactctgaagatccccacaggtggtggaaggatgacatgagattggggtcagagtcagagccggctacaagcttttctacagactcagcttcctttccaggcacaaagaacgtgactctgcctgtgcgtgggagactgggagagtgagcacgtgcgcgtgtgtgcgtatatctgtgcctatgcatactaggtgtgtgggtgtatgcacctgtgtgaggatgggtggatgcagggggactgggaggaggagagtgaggtatgcgtgcataggcgtgcctgtgtgtgcatgaggaccttgatggggatgcacccctctcgtgtatatttcatgcgtgtgttggtgttgtatgcggattgtatggggctaccgctggcagcttagtggaacatctggggcacagattctggagcggaaagcctagtctgcaccctggctcttcagcttgctggcaaagggtaccagccaccctaaaataggccactttggcacatggattattttgagctaaaggccgttgagaaccagccaccacaggaaaagctccttatctcctcctaactgcctaaaaattgagtgcagacaatccccaacttaccatggtccaatttggggtttttcggctgtgatgttgcattcagtacactcctggacttacaatgggttaactcagaataaacccatcataaatggaaaatattgtaagtcgaaaaggcaccatcataagtcatggagcagctgtacaaatagacccttttgtaagggaaatttccacgtgtaaagatgtctcatacgtgggagagagctgctcctggggagccctgctgtcacctgaggcttttctctgcagaacaagataactcttatttacctacatctcctcctgaccccttcccagaacagccctccccagcccagaaactcaaaaccccttttcctttgttgatatttaaaccccagtcccacccacccctttggttactgatcgctgggtgctctcatgtgtatacacaatgcacttattaatgaacttcggtttgtttttctcttgttcatctgtctttttcgagtctcccttatggggccccagccagaaagcctaaggtgggtggaggaaaaggatcatttcctcgctcatgccataggggaggcaagctctcctagaggggtgctagccaccccaaaatatgtctcttcggcacatagactattttgagctaaaggccattgagaaccagcacaaggtgctggagaaaggccacaaagagtatgtcagggaggccaccaggagctcatacttcctggagctcaacaggcttgaggcaggacatgctgtgtgtgggaattgtgtgggggtgggcggggggttgggaaggatggaggaagagattgtgtgtgcatggaggaggtgcatgggtgtgtgagtgtgtgcacaggtgttctgtgagtaggtgtagggggctgtgtgtgtgtatgtgcatgtgggtggggctgcacaggtgtgtggctgtgcaaagagatgttctatgagtaggtgtaggagtgtgtgtgtgcgtgtgcatctgtgtgtgcatgtgggtgcatggcgtgtgggtgagtgcacaggtgtgtgggtagataggagtgtgtgtgtgcgcgtgcgcatgcgggggtgctcaggtgtatgggtgtgtgtgtgcacaggtgtgtgggtaggtagggatgtgtgtatgtgtgagagtgtgtgtacatgtggggggtacagaggtgtgtaagtgtgtgtgcacaggtgttgtgtgggtaggtaggggtgtgtgcatatgtgtgtgtgcatgcgggggtgcacaggtgtgtgggtaggtagggatgtgtgtgtgtgcatgtgggggtgcacaggtgtgtgggcgtgtgtgcacaggtgttgtgtaggtagcccccaaggggtgtgtgtgtgtgtgtgtgcatgcatacatgtgtgtctgggccgggtgagagtgtcggcacatctgtgcacgcagtcagctccatcaaggctgaggttgaggctctgacccctcacaggacctctgggaatccaggccttgctgccagtcctcagctgcaggccaggcatccaccgcaagccctggctggggagcaaggtgagaaaaaagagaaattttgtatctgaggaatgtgagcccctttaaacgatcaggcccagagaggcactgaaatgtgacagcagccatgtctctctcctgccttgagctaaataatgacttcttgaagccacttgctatgtggactgactgacaccaggcagccataaaatgccatctggacaccatacttcataccctatcattcaacaatgcacagccaatcacagctcaatgtcatctctgcaacccagtgagaatgcctgtcaaacaactgtatctgcttcaaaaacctgctcgtaatgaaggctggacggagcactccccaaggcatcttagaagtgtgtcctgggtggccgggtgcagtggctcacacctgtaatcccagcactttgggaggctgaggcgggtgtatcgcgaggtcaggagatcgagaccatcctggctaacacggtgaaaccccgtctctactaaaaatacaaaaaaaaattagccgggcatggtcgtgggtgcctatagtcccagctactcgggaggctgaggcaggagaatggcatgaacccaggaggcagagcttgcagtgagcggagatcgtgccactgcactccagcctgggtgacagagcaagacttcatctaaaaaaaaaaaaaaaaagaagtgtgtcctgggctgctgtcctcaaccttggcccaaataaactctctatattaattttgcctcagtttctttatttcagtcaacaaaaggtgactccatgcagctcagccccacaggagaccccggggcccctgcttggagcccgtgagagcctgtgagggcaggaggtcgccctcctgatgccaagggaggacacatttctgcagcccacctgtgtgacctttgtgtcctctcttggacctccagaagccatgccctgagtgggcactgggattccacaggactcagggacgcactccacttggctgtggggccatctcaacctcaggacggtggggcagacagagtgtcagggctcagaggcaccgcagagcctcccgggccagggtctgcactggtcccaaccacacacagtaagacactggaaaaaccaactcaacaaatgtgtccaggttgtacctctatggggtaaaacccagtcagagcccaggcagcctcaagaagaaaattcagtgttgaactcagtaaagactcactctgatgtcttcatagatcgccaaggacaacccccccaaaaagggaggaccagtctgagccagaaatgccccagggggacacatgccctccagaggcagctggcttctcagtcacatccctgaccttgggaagagcctaaacctgcctccctgtagcactccctctgcaccagctgctaaacagggacctctctcaggttctgaaatcattcattcattcacagagtacctaccatgagctgggtccttcacagggcaccaagaacatagcaatgaacatgacagagacagactgaaccctcgtgggcttatggggtatttggggagaatgtggaacaggcaatcattgacataagtaaggttgccagataaacaacagagagctcagtcaaatgtgcatcttgaagaaacgatgaatgtcccatgcaatattttgaacctggaaaaattatttggtgtttacctgaaattcagatgtaactgggtgcctcatgtttttctttgcctacataagatattttcagctggtgacatagtctgaggaaaataatcgaggctagagagtgaaggagtggccagagaagccaaaacctgaatggaaaagaggcccccaccccggagtccacctccactcccccagctcattatcagtaaagagtgtggaactcactcattaccacgaggagggcaccaagcccttcttttcttttttttcttttttttgagacagggtctctgtcacccaggctggaatgcagtggtgtgatcataactcactacagcgtcgatctcctgggctcaagcaatcctcctgcctcagcctccagggtaggtgggcctacagcacaggtgtgcaccacccaatttctttagctgagtcctggttgcttaagctgtgactcactgtccccataaaaaccttagaaatgtccccaggaaccaaagtgaggagattccattggatgtcatttaaatacctgtagcagagtggtccccaagagataaaaagtctttgaacagaatccagaatagaatcaagcagtaaaaccatctgctggcgccatgcttctggtgagggcttcaagaaacttctaatcatggcagaatcaagaagcttccaatcatggcagaaggcgaatgggagcgggcatgtcacatggcaatagagtgagaactactcatgaccacaaggagggcacaaatcccttcataagggatctgtccccatgacccaaacacctcccactagcccccacttccaacactggggatcgcatttccacatgagatttggaaggaacaaatattcaaactggatcattgtgcccctggaccccaaatctcatgtccttcttatattgcaaaatacaatcaccccttcccaatagttcccaaaagtcttaacttgttctactgccaactcaaaagtccaaagttccatctaagacacaaggcaagtttctaccacctatgatcctataaaatgaaaaccaagttatttacttctaagatacaatgtggtacttgcattgggtaaagattcccattccaaaaggcaaaacgtggcgaaaacagaggggaacaggccactttgggaggccaaggcgggcagatcacctgaggtcaggagttcgagaccagcctgaccaacatggagaaaccccgtctctactaaaaaaaaaaaattcaaaaattagccgggcatggtggcgcatgcctgtaatcccagctgctcaggaggctgaggtaggagaattgcttgaacccaggaggtggaggttgcagtgagccaagattgtgccactgcactccagcatgggcaaaaagagcgaaactccatctcaaaaaaaaaaaaaaaaagaaaggggaacggccacatacaagtccaaaacccagcaaggcagacattaaatcttaaaactccaaaataatccccttgactccatatcctacatccagggcactctgccacaaggagtgggctcacaaggccttgggcagccccagccccatggctttgctgggtgggcacagcccacgtagctgctatcacaggttggagttgagcttttccaggctgagggtgcaagctgccagtggctctaccattctggagtctggagggcagtggccccattctcccagctgtgctaggcagtgcccttgtgggtactctctgtgggggctccaaccccacatttcccctcaccattgccttagtagagtctgtcttctggggctccatcccagcgccatatttctttttgtcttttttttttttttttgagacggagtctcactctgtcacccaggctggagagcagtggcacaatctcggctcactgcaacctccacctcccaggttcaagcaattctcctgcctcagactcctgagtagctggaattacaggcacccaccaccacacctggctaatttttgtatttttagtagagatggggtttcaccatgttggccaggctgctctcaaactcccgacctcaggtgatccacccacctcggcctcccaaagtgctgggactacaggcgtgagccactgcaccctgccaatgcttcttttcatttttatttttttcttgcttttagtattttgccaaggctgggtcatccaggcattacgcttcttatacagcttgcaggactatgagctgaataaacctcttttccttatcaattacccagcctcaggcattccttataatgcaaagtggactaaaacaccaattgaaaccaaacaagtggtgaagctacctgggagggtattacttagccccagatctgacttaagaaataggaaatgcatatgctgaaccctggggacacagactatgccaccaccctttttaggttatgggaaatcctgtttaaatgactaacaataggacttgtgtcctatcaagaccttggacaaaacctccatccaagcctgaagtttccgtggacattaaggaatcttagaggaggtaggaaccccaaaaatgggttggaaaactaagctcgaaattttcttggtgtgacaacatcattgccttagtaggctctcattttttaagcttgacaagaattgagcaaagaaatgtttcagagaatcaaacaatttcaactttggaatttgaaatatttttaatatttaagagaatatgggctatgttaagcttgtccaacccttggccagtggctttgaatgcagctgtagctttaaatgcggcccaacacaaattcgtaaactttcttaaaacattaagagattttttttcaattcttttttttttttttttttttttttagctcatcagctatcattagtgttagtgtattttatgtgtggcccaagacaattcttctccttccagcgtggcccagggaagccaaaagattgcacaccccagtctgtgtgaataaaaagtcagtcttaaggttttaatttaaatacacaaatgaggccgggcacagtggctcacgcctataatcccagcactttgggaggccgaggtgggcgtatcgcctgaagtcaggagttggagaccagcctggccaacatggtgaaatcctgtctctactaaaaatacaaaaattagccaggcgtggtagtggatgcctgtaatcccagctacttgggaggctgacaaaggagaatcgcttgaatctgggagatggaggttgcaatgagacgagatcatgccactgcactccagtctgggcgacagagcaagactccgtctcaaaaataaagtaaaatgcacaaatgaatcattgattgatttagacttgtgatattttaagttgaaattttactatgcttgacagaagtgttaaaaagttataaaaatttgaattcatgataagcataagttaccagatttctaagaataatttaagtgcttgagaaagttgtgtttgttattaaggcaactgaagtatttttaaaagaaattgaatatgttaaatctatacatgcagttaaaaatgtttaactgtgtgtcaacctgaaataaccaggagcgtcagagtctaatttaaaaagagtttaggccaggcacagtggctcacgccaataattccagcactttgggaagctgtgtggatcccttgagtccaggacttcgagaccagcctgggcaacgtagtgggacaccgtctctacaaaaaattttaaaaatcagccatgtgtggtggcccacacctgtagtcccagctactgaggctgaggtgggaggatcacttgagcccagaaggttgaggctgcagtgaactgtgattgtgccactgcactccagcctgggcaacagagcgagaccctgtctcaaaaaataataataaaaaaaaatgtaaaatacaccaaagtaaaataaaatagagtttattcaagcacaagatttgagaacggccacccagaaacctcaactccaaagtaatgaactcagcattccgaagtagggaagtgaagttttcatttatagaggcagggacagaggaatttttagccagataacaacatttttcatactaggctggcgcatagttacagccatttgactggttatgggcagtgtttcttttggcggagggcatatttcacattttttgtgaagggtatgatagctatgcgtttcctgtcatctgttctacgcagagcaggacaacaaaggggaagtagatgagtcacagggtcattaattaagaaggcaggagggttttgtccctgctgttctttaattctctctggtcattgtacagaataagaaaaataagaaagtgagttaatctacaatctgaggaataaaaggcacatgactcagatcccagtcacagctctctcaaggctgaagtgtgtcgggggttctgacagattttaaattatattttcatgcatgtttaattagccaagattgtcaatggaaccaaatattcagttgtatcattttaataattttataataatttttaaagtttttttttctttttgagacagagtctcgctctgtcgcccaggctggagtgcagtggtgcaatctccgctcactgaaacctctgcctcccggattcaagtgactctcctgcctcagcctcccaagtagctgggattacagtcatgcgccaccatgcccagctaatttttgtatttttagtagagacagagtttcaccatattggccaggctggtcttgaactcctgacctcaggtgatccacctgcctcggcctcccaaactgctgggattacaggcatgagccaccatgcctggcccactaaagttgttatattttaaaagaatacttttcctaaattttttcttaaatttttaatcgtggtaaaatatacataccatacaatgtgccatgtaagctatttgtaagtgttcagttcagcagagtgttaggtacgttcacattgttaaatgcagccaatctccaagactcttttcatcttgcaaaactagaattctacgcccactaaacgacaatttgccattcccctctctcttcagcccccagggcaacctcctttctactttctgtccctgtgaatctgactattgtaggtacctcattgaagtggaatcatataggccaggcacagtggctcatgcctgtaatcccagcactttgggaggctgaggtgggaggattgcttgagcctaggagttcaagaccagcctgggcaacatagtgagaccccatctctagcaaataaaagaaaaaagtggaatttgtccttaagagaagatttttaacttgaactcaaagctaaagtgggattgttgaatttgaaatgacagtaagtggaataataatttttgaaaaccaaaggagatcctttttttttttttttttgagacagggtctcactctgtcacccaggctggagtgcagtggccgacctcggctcactgcaacctctacctcccaggctcaagcaatcttcccacctcagcctccggagtagctgggaccacaggcacacgccaacacgcctggttaatttttttgcatttttggtagagacggggtttcaccatattgcccacgctggcctccaactcctgagctcaagcgatctgcctgcctccgcctcgacctcccaaaatagtgagattacagacataagccaccgtacccagcctactatcttttttttttttttttttgagacagagtctcgctctgttgcccaggctggagtgcagtggcatgatcttggctcactgcaggctcccgggttcacaccattctcctgcctcagcctccctagtagctgggactaccggcgcccgccaccacgctcagctaatttttttttgtatttttagtagagacggggtttcaccgtgttagccaggatggtctcgatctcctcacctcatgatccgcccacctcggcctcccaaagtgctgggattacaggcgtgagccactgcgcccagcccattatcttgtttaaacctcacaaccacctgggaaggaggtgccatgattaacccccatttcacagatgagaaaactgagactcaagtgagatgacttgtccaaggtctcctaagccaggaagggctaggatgtcaatccaggtggactgattctcgagatggaaaatgtgaccacatcatggggtatggcagaaatgattatagcgccttcttccaatgtggttgtaaatgactgcgtgatgttcttcctacacaagggtgtgtgtgtgtgcatgtgtgtgcatgcgtgcgtgtgtgtgtgcacgtgtatgtgcgtgtgtgcatgttgtgtgtgtgcatgtgtttgtgagcatccgtgcatgttttttgctcctgctaggttgctcataaggatggacctgtgtccccactcccacccgcacagcacctgactctgtgatttgtttatcaagtgatttttaaaacgaatcaacgacccaggctcacaggacaaaggcactgaggtaacaggacaggcctgaaggatgagacacaaaagacctccctcttttaccaactggctctgcgcccttcggccggtcactgcccctctctgggcccctctcatccttctctgagcttcagtcgcccctttgtccagcgagaagttcccactctaagggacctgccactgacctcacacaaaggtggcccctgaattctgacccaaaccaccaggaaaaagagggtcccaaaagctaaaggaaggtgctgagcagggtgggacagaggcggaggcattctgatctctcgggctcaggccggccagcgccgcctccctgcttccaagatggggatctggcgccaccttgtggtctccgcctcttgcggccttcgcgtgttccctgttttaactcttgctattaaccccactgctgccctctgggaactctgaagcaattccactctcttcaccaaatatttatctactgtgcccagctgtacccaggctcgacccagaaaaatcatgaacaagtccctgcctaaccatttagaggcgtctggatctgcaccacccatagaaaaatgatgcaaaccagccgggcgtagtggctcacgcctgtaatcccagcactttggaaggccgaggtgggcagattacttgaggtcaggagttcgagaccagcctggccaacatggtgaaaccctgtctctactaaaaatacaaaaatcagccgggcatggtggcgcgtgcctgtggtcccagctactccagaggctgaggcatgagaatcacttaaacccaggaggcggaggttgcagtgagaaaagctcatgccactgcattccagcctgggtgacagggcaagactctgtctcaaaaaaaaaaaaaaaaaaaaggaagaaagaaaaataaaaatgatggcaaccacaaatgtgtgcctcacaggtaaccacattttctagtagccacatttttaaaagctgaaataaataggtacaattaactttaacaatacgtctttgggctttttgatgtttgtttgtttgagacagagtcttgctctgtcgccccagctggcatgcagtggcacggtcactgctcacttgcagcctcaacctcgtgggctcaagagattcccccaaccttggcctcccaagtagctgggagtacagggggtgcatcaccatgcctggctaatttttaaatttttttgtagagacagggtcttgctatgttgcccaggctcatctcaaactcctgaatgttagtgatcctccctcctcagcctcccaaagtgttgggattacaggcttgagccaccacatccagctaataatacatttgcatttaatgaaatacattcaccatattatcattccaacatggagtcaattatttttaaaattaccatctttttctccttgtaactccttgaaatctgtattttacaccaggggtccccaacccccaggctatggaccattaccagtctgtggtctgttgggaaccaggcacaccgcaggaggtgagcattgggctagcaagggaagttttgtctttagattcccataggagcacaaatgctattgtgaactgcgcaggtgagagatctaggctgtgagctcctgatgagaatctaatgcctgatgacctgtcactgtctcccatcacccccagatgggaccatctagttgcaggaaaacaagctcagggcccccactgattctacattacggtgaattgtaaaattgtttccttatgtattacaatgtgatgatagaaataaagtgcacaagaaatgtaatgcgcttgaatcatcccgaaaccatccccacccccatccatggaaagcctgtcttccacaaaacaggtccctggtgccaaaaaggttggggaccactgttttacacctacagcatgtgtcagttcagattagccacataaaccttgtctggcagtggctacatgttggaaagcatgggtctaggacctcccaggcttactctggccccctggcagcccctcagacaactggcttattacatcttctccagaattcacctttctagctttgcttcactgactaagggtagaaccctggcccggacaagtcatcttacccttggatgtataaaataagggtaagaaaaatacttacttctggggttgtagcaaggattcaatgggataacatacacacagtgcttagcgcaggtgcctggcagggaataaatgctccataaatggtgacctaatgaatgaaagccttagcccatctttcagcatggtgatggttaattttctgtgtcgatttggccaggctatggcaccccatcatccagtcaaacatcagtctggatgttgctgtgaagatatttttcagatgtgatcaacgtttaaatcagtagactttgagtaaagtagattgcactccaaaatgtgggtgggcctcatccaatcagttgaaggccttaacaacaaagactgaggtttcccaaagaggaggcaattcagcctccagaatgcaacatagaaaccgtgctgtttccaacctgtagatttcagactcaagaccgcaacatcaattcttctcccatttctgactggccagctctacaaatttcaggcttgtcagcccccacaaccatgtgagccaatttcttaaaataaatctctctctctgcatatataaatgtacccccgagtggggtacagccacagcagcacgcagaagagacatgacttcctcattctgaactcacgcagtattagaacaatggagcaccccagcccttccccgcctctgagcacgatgtctctcaggaccgagagctgaggcagaggctgaatcaacgcccccatcccagagactcttctcaagggagtgagaccaaagggtgggctttgccaggggaaagggaatgtgacggggccaggcagggccagggttatggggatctgctcttgagggtatgactgcaggtccccatggtgcagagtcaggggttggggcgatccctggccacagaaggattgctttggggatccatggcccagaccccgacctcttcctttctctggtctcctgccagaattcctgtcaaatttagctgcctacagcagccagagtgattttcctaaagtgtacatcgtgccgttgacaccttccaaagtccttcccaggcttcccccatgaccccataaagataaagccccaaagccttttccacgacttacaatgctctgtgtgacctggccacagccagcccagcctctcacattgtggaagctttgaagtatgttatcaaacagcatgtagtcagaagcccatgtttacaaaaacttaaaataactatatacgcataggaaataactaccgtctactggaacttgggtctgtgccaggccacgatgtgcagtaccttactggatatcatcttgttattccttgttccttataacaattcctagtatctcctttatagaagaagaaactgaggcccagagaggcccccagctagtgaggggcagagccagacttgaccccaggtccaccaagaccaaagtccatgctcttcactgcaggctggttggtgcctctgtgcagatggaagataataatagctctcacctcacagggctgtcgtgaggattaaacaggctgagatgtgtgtgtgaatgggctctgaacagctcctggcatggcgcaagggctcaggaagtgtgctgccccacagcagcctgtgggcagcccggccagatcatactcatagattcagactgatctctggtactagggtcatgggtgatcatattttttttaacttttccacaatgaccaggtaatacttgtgcatttttttctttctttttaaattattgtatgtatagtgctctcagtaagctgtctgtttcctcaaagcaggcttgtcgaagtttgagtggcctccctggttcccccaaggcctggcccggagaccccacacccagtggaggaacctaacagaaaacagctcagaagagcccctcttagcccaggcaccctgcccacaggcttggcaggggcgcttgctggaggggtgggtgcgggtctgtgccaggaactggcctaagctaagtccccaaaagacaccgtgagatgctttgtggctcttccggatcccaggggagaggtgggagcaaccgtgatgcatgcgacctccggccctgaatccaccaacagctgtgactacttcagctattttaaacctctgggcaccaggaaactcctgtctcatcaaccaggctctgggcccaacatgatggcctgagcccgggcaggagtcctgagtgtgggtggccaggtctgaattgggtttttaaggggagggggcttcatttcttgagccttgtgccaggctctgtgctagtattttctgcaccttgttgtctcgtttaataccgtccttacaccgtgctgagggatcagttacttcacagaggcagaaaatggggctccgaatggcagggtacctggcccaaggcggcacaaaagcagagctgggcctagaactgcgacttccttatctacaaagcatggacagcattctgcccctgccctcactcggccttgccccctgcctccaccccagtggccctgcaagctcctccctctgccactcttaggagctctgcaacccagagtcaattcccccacctcctcacagctcactttcttcatctgtaaagtggcggagttactgggagggttcagtgatctaactctaatacatgaaaagagccgcttggaacagtgcctgacccacagaaagaaagcagtaagtgcccgctcttactccagctcccctgggtattgcggtctgatgttatcactatcttgcccagtgtcctgttatgagctgcccggggtctccgtcagtggggggtacagtgtcctcccccactctggccccagtctccccatgagtcaaatgaaagttagagccccaggaaggtgagaaccctggtgggtgcccgttatctgtcacacagtaagggctccaaagtcactcgtggcagaggggtgcccagacacgagctcacctctgggggcgcctcgaagtctctccaagctacacaagttttgtcccagtttggcaggtggccacccgagagattcctcctgattggaggatgtgctcagccgggtgcctggagttcatcagaagttactggcctcggccgggcgctgtggctcacgcctgtaatcctagcactttgggaggccgaggcaggtagatcacctgagatcaggagttcaaaaccagcctggccaacatggagaaaccccgtctctactaaaaatacaaaattagctgggtgtggtggtgcctgcctgtaatcccagctacttgggaggctgaggcaggagaatcaattaaacctgggaggcggaggttgcaatgagctgagatggcgccattgtactccagcctgggtaacaagaggaaaactctgtctcaaaaaaaaaaaaaaaaaacagttactggcctctccctgggtctgtgagctgtgcctttgggggacaaatgacctcctggctaaaactcgggccttccctcttccccactcacattcctcccaaatccctgccactcagaagcagctgggctcttcaccacctcctaatttgggccgcctcagggagaaggttggagtccaagggctgggtatatcagcactgggcacttgtgggcctcacccctcttgtctgggggcacccgttcctggagctccatcttccatcagctctaactccttcccaaacacacatcccctccgccccactccttccctcccacggcctctgcccaccccccctcagtttctgtcctcacctaccaaagaccacttcctcacacagggctgatgtatgtgtctgaacagcactcccactgggtcccaggggaagggctgggacatgggaggggctggccgaggcccacactgattgtcatcctacatctcagcctctgtgagacacacgatgacctctgggtggcaccccccttcccttggtggcccaggccagaaccggggccctaatccttacccctctcctctccctccacccacacatcctatcagtcaccaggtgccaccaaaatcccagtccctaagcagtggccgggtcagtccccacctctccagctctggccacagccaggggcttccttgcccctccccagcccagaatgacccatttcacgagcacacccgaccacggctcgcggagacaaccactccaggctcccatctcccaccctccaatgccttggcttggcgtcctggtctccctcagctgccgggttccccatccccaccgcttcccgttttctctatggtgaggttcatctgactgttgggggatgggggtaccgggctgcacccggctttgcacaggcagctccctctcctcgcctttaatttgcaaacgcctcctttaagaaggttccaggatcgtcttctctgggaaggcttcctggcccccaggctgggttagggcaccctctttgtgttcccacatttgcattttcagccccactgggctggggcgtccggaggggagctagggccctccaacacctgggcgcccaccgaaggtttgtcgaatgaaagaatgacaatccaaccatggaaagcacaaaactggtccctgatgacttcgccacgacctcagcggggcgggacgagttaggggcgggaccacgcttgacggacaggcccgcagcccactgcgagaggactggggcgggccgccccgcccaccggccgctggataaggctgcgcgcggggccgtggggcgcaggctgctggagaaggcgcacctgctgcaggtgctcccggccgccccggaccagcgagcgcgggcactgcggcggggaggatgctgcgcgagcggaccgtgcggctgcagtacgggagccgcgtggaggcggtgtacgtgctgggcacctacctctggaccgatgtctacaggtgagccggcccaccgtgatgcccgggccgagatctcgagcccagaaatcctgagacgcgctcagactcggggacgtggacagcctttgtccagcccgagttgtccctcatcccgagcccccgagcccagaaatcctaagaatctcatccagaaacctgacaacccccgaaccttgtgtccaccttccagaaaccctgagactctcccagaccccctaacacagcctcagccccagctccctcacagaccctccctttcacccgtaaccctccgtctggccctctccagttctcctcccgggggacctcacaccccttcagcttccctgccgtcctctcccctttcacttcccctccgcacctcacttcccctcggacccacctcaacccagcccctctcctgcttcccactcccagttcagcggagcttccgcggagacttgccggggactggggcaggacccgaagggagctgccctgaggctgaatccggccctggaggttactcaggctccgatttcgccctgtgggggctgctggtggttgcttgtccccaggcactggccctgagctccgtgtccccagataccttcccctgacttcattctgagaccacagagggacaatattctacccagctgacgacggggacttggggtgtatagcggggtactttgttggaaaaggatcctgattcagagttctgctccctccccttctctctgtccaagaacttggtagagtgcgggatgtccgagacagctgaaggtagggtagggccctaccactccccccgcaatcccagaaagcagccaagtccaatgatctgtctccctgagtaatgggacggggccttggaaaggtgtggctggtgtgaatgaaagggtggggttatgctggggtttgatctgccccctctattccaagcatttaaaacctccccattgctagggttggaggggtcagtgctgggggcagggagcatgcaggactctgaggtgggaccctgtgctgacaccggatgagtcccctatcctctctgcctcaagctgaactcacacggaggcaccatcgtggtttatggctctcaaatcatcctgacacctggagcaccctgcctctcccaggcccccaccaacccatcatgtgtctccccacacagccctggcagccctcccacctgcccaaccagtctcctgccaccgctgcagaggcactggccacgctgataccaacaagccccaggactagggacccactccatgcctctgtccctggcctcaacctctgccttcccctgggcctgggcttcagttgtcccccatgtaaacctcagaggtggactgggtggtctctgagaacaagaacacagcagtggagggtggtccaggctctggtggggtgcaagagctcccctgccttccccacccccagccctgaactgggcaccgctagggagtgggcgcggagccagagtgctcaggtctctaagcctcagctgtcaccatacccacctgtttatttgctggggcatggttggtgccgcctgaaaagctggcatgatcctcccagtcgggggtggggagcaaaggagggttcctgctcaggcgccctgctatcgctctatcctggcaaagagaggcccagctggggtaggggcacagagtggggcagatatggactcagcctccctctagcagggggcagcagtgtgacgattccccttgtcctgtctcaacgaccacaaagaccctaacccccaccggcacttaaggttctccaccaccacagagaggggcagtgcgctctagaccagtactgtccagaaaagtccagtttgaaccacaacaaaaccacaattgcattttaaatcttctagtagtccacacttttttaaagttaaaacaacaggcataattttaataatatattttgtttaacccaatattttagaatattatcatttcaacatgcaatcaatataaaaattattaaggaaatggtttaccttccttttttcatgctaagtctttgtaatccagtgcacattttacacttcagcacatctcagcgtagattgagtgcatctcaggtgctcactggccaccgtgagccagtgacaccgggacagaacaggtctagtgcagagtttctcaatctcgcactattgcattttgggctcgatatttctttgttgtagcgggatgtttagtggcatccctgacctctgtcccctagatgccagtagcaacccccaaattgtgacaaccaaaaatgttgccagacagtgccagcagtcccctggcagggggcaaaatcacagccagctgagactcactggtccagtggaaggaagcctcttccaggactaaggagcttgagttgttactgctattgtgactcgagttacctgtagtaatgagagcaactgccagtattgataacaggaggaggtattagtgggcacttaggaactgaacccaccacctcctttcttcctcaccatagaccctggagggttcattgatcatcccattttacagatgaggaaggtaaggctcagagagatgaagccatttgtccagagtcacacaggactcaggtccaggtctgtttgactcagaactcatgctcttataccccactctgtcctatgtgaccctaaaaccagcgggttgaactggacggccctctcagcctgtgtctcttccaccctggccacgagcccactgtccccagagacttcaccaactcccatttggccctccactcttccctgagtcctttgctgcccggacacaggtcctggctcaagaccccaagtgatgcccccagagcctccaagtagaccccaaggaacaaggcccgggggtgctgggcccagttaattacggagtggcatcctgaccctcactccttctgagtcgcaaaggtgagcgaaacggcctcagcacccactccctttcccaagggctctggactccctttcctgtgatgctggcacacaggatcccctccagacacatagcaggggcctccccagcctcattcctcaatagaccttgtggtcctggcaggcactgccctaccagcttccatccacgggctgtgtgaccttgagcaaatcgcttcacttctctgagtctccactgacccaaatgggggtcgatcagagaacaggaggaaggatcttgtattcaatagaagatgtacactcagggtcacagtgatgaacaattgaccactatgctgccctatgaggggtcatccaggccaccatgggcaggggtgctctgggccacccacgctctcccagcaaaactggcccccctggggatggatgccttgacctagcctcattctgactgctagtctccagcaagcaatgaatagatacatagaaagaaggaagtagggtgtttgttagaaattgtactttgtgattgttgttaaagatactcgctgtttccttctgctcttcccaaatatactcatcttagtcttggcacaggtacacctggcccacacaatctcctccggtggtccctttagccgacagtcacttcttcagtggggctggcctgggtccccatctgatttgggcttgaagttggaaagagagcacagagggagtccctaggttggttccatcctggccacccacctcttgtgagccctggaggcatggacactcccagagtctggaaggattattagggacagggcagcctcggagtaaagtaggtagcagggtggtcactctctgcccacaagctgggccttgggaatggcttcttctgttcctccctcggcttatgcctctgtcagtgagagttctcgagaaggcagggctcttcttttcctccctggtgtacaggagccaggatccagatcctgaggtctgcaggagcttcaggacactggaatgatcttaacattgtccctttgcctgtgcagaggttccagctgcgtctgtgaggtggaggtgggaggattcccttccctgggattccccaaggcagaggctgaccagccattgtcccagtagaagacagaaagaagataaatgtcagctagtaatatcaagtaaatagtaataatttgcccataactcgctggcagaagataggaagaaggtatcaggcaggcgctcctagactttggcacaaactcactcccagactttctgtctcttggttggtgtgaaggctagagatgtatttgcttttttaaaaagtgtcattaggacaaaggccaggagggtctgagatccagttttccatgatgggggcctggggtgctatgggctcccctccccatagtgtgccaggccctacctcactgatctcctcttctagcaattcctcagcacacactccattccggccacgctggctttgtggatgctgttagcccttggctgtgccaagctcattcccacctcagggcctttgcagttgctgttccctctgcctggaacaccatcccccagatccccacaagcctgactttcatcagtcaagtctcagctccaatgtcacctcctccaggaagctttctttgactaccccatgtcgtggtgccctaccctgagtcccgagaactctgtttcatcacatttttttctttgcacaacttctcatcgtttcttaatgttactagttgacatttattgaacacttattttgtgcaggcttctcaacactttgcatgctcatctcacggacatgtaataatttacgtatttaaaccttgcaacaactttatgagttaggtacaattattgtccccttttcgcagctggggaaactgaaggaaggagtgtttgtccaggatggcacagccagtaaactgtggggtgcagagcccaggcccctgcctgctctgccaggctgccctcctggtacttatgtttcaggcgtgcctcctccttgtttgtgatcctccctggagtcaatgaagggctccctgaatgaatgaatgaatgaacgaatgaatgaatgaatgtggcctgtgatgcctgtggactggcctgtcatggggctgagctccccacccccagcctcaagggacaggcaccgttggatgggcctgtggaaggtcaagggcatgtggccaagcttggcccgagcagcgcttgctcctgagagaatgacggtgggaggaattcaggccaggtcaggtggcccataaattagaacagcacccagagccctcaaccccaaacgggatgccttgccaggaattgctccagggctctggtttcaggctagtttcctggggttgggagtgttctaaggagaaccaggctcacagtccctgcatagttggggtccctgagaccttccctcattgactgcagggccctgagttgggatgggagcacagtggcaggggctcaccccagtgcccacccctagctggccagacatacctgctgcactttggaggaggcagcttttgaaggcagctctttcctgcccagccacgccagaccttgcacccagaggctttgatgggcccaggcttgcttctctctgtcattgacccaagagcccaggacaggaagccagtctttagtgtcccttctctgtgtctcagactcccacctgtgaaataagtaaggggctctcatttggtcctcttcagagccaggcctgatcctcccctctgccccacaccaggcacacctacctgggggatctcaggaaagactccagactttgaattctctcccagggaggggacagccaggcccaggtctcagagagcctgagttcccctcacactcggccatgactgtccctgagatttgaagcgggtgcttgccctctaggggcctcaatgtgctcatctgtaaaatgaaatcacagtggtatgggcctcatggggttatcgaaagaatgggctgaggtcatgtgggccatgggcttggtacagtgcctgagacataatgaatactcagttccctggtggtctagtggttagaaaaataataataataataataataataataataataatagtaaatactcagtaagttgttatgtattagtattgagtttattttgaaaacaagtaataatgagacctgatccctctcctcaaagacttcatagcacttatgggaaagaaatctagaactgaatttattaagtgttgtttgagacaccaataaatggagggagagatatattctggctgatgagatcagggatgacttcctggaagaggtggcaactgagctgggtcttgaaggatggactggggttcagagtgagaccaagaacatgccactcaggggcagagataactggcagggaagttggggcacacagagacagaaagggcacagcttcagaggcctggagtataaggctggagggtcaatgagctctaaccaggctttgaatacatcgttcagacattggactttgttctgtaagtagcagggagtcactgaaggtttctgaggagaggagtagctatagatcagattgtttcttccctaaggagaggcccgggacagctggatgcaccaggtggtgagggaagctggctgaaggcagacgtcattgtttgcctccactgatccctgttcagggcagctgcccacccacagggccccagccaccaccatgccgagcaccaggtgtgaggtctggactgaggtcattctccccgctggtccttgcctgcctcttgctcgccatggggttgcatgacaggctggcacccacgactcccccccccagactcctctaaagccccaagagcaggatgtcacacccaggctgccaggagctggggtcactctggggatgagccccagctggtgttaatgaggcccaggccaggcgggcaagctaagaaagccagatgccagcaaggagcaggcgcttcatgccctcaagtctggggctggtgagccaccccagccctgcaaggccaagccagtgaccctccccactgaccgagccaagaccagagaggaccatggctcctagagaccacaaagcatttgtgggactgggcaagtgtcgtttgtttgacaccaacctagtggccatttctctccatttccacagccactatctggtcccaagacaccataatcgctcacgtgggcagctgcagccacctcctccccacttcctctgttgctttcctgaaatccatcccccaccctgcattctgggcaaccctgcaccctggatgatctatctacagtgcaaaactgatcatgccacccctgcttagaaaccttcagtgacttccctctacaatcagaggaaggccagctcctcaccattatctaaaatccctgctcccaccactctccctcccccttgctcacaaactccagacacactcccctctttccagcttctcgaacatgcaggactaacccccacctcaggccatcacgcaagctgtcctgttgcttggaaatctctgctcctcttcctctccttccttgtccaactcagtggttgtcaaactgtgggggaccagcagcatcaacattacctgggagcttgttagaaatgcagtttctcaggtcccaccccacagtcgatagatcagaaactcaggggctgggcccatttacctgtattttagtaggccctgtaggtagtggtaatgcacactcaaatttaagaatctctggtttaattttttttttttacagtcagcactgcaatggtgtaattaattcctgcctgtcctttagattataaagtttaaaccttagttcaaatgccacttcctcagggaatccctccttgaaccccagactggggcctcatggcaccctctcctcctttatagtaattatcacagctgtaatcatgtaatccattgaaagtctgtcttttctgtccaggcacagtagctcacacctgtaatcccagcactttgggaggctgaggcgggcagatcacttgaagtcaggagtcccaaaccagcctggacaacatggtgaaaccccgtctctactaaaaaatacaaaaattaaaaatagccaggcgtggtggtgggctcctataatcccggctactcaggaggctgaggcaggagaatcgcttgaacccaggaggtagagattgcagtgagccaagatcatgccactgcactccagcctgggcaacagaggaagactccgtcccaaaaaaaaaaaaaaaaaaaaaaaggtctgtcttttccatgggcccagggaatgtgtttgctttttcactaatctacccctcaatgcctagaactgtgcctggcacattgtaagtgctcagtaaatacatgttgagtgaatgaacgaccatataagtaagcccgcctcctccagccctcctgcagcaaacatttatacttacggtgtgcccatactaggccaggtgctgaaacaaacaaacaaacaaacaagaagatccaatccctaccttcaaggagtgaactgccaaaagggccagtaactgtgggggcaaatggatggagttaggtcttcaaggagagatggacatttgccaggcagagaagtcaggggaaagtcttgctggtaaaaggaacaacatatgtcaaaatgcacagtagatggaacaatgcagggagctgaagtggtggaaggaaccgcagaaaatgaaaccagagagtcaagctgagttgcaatggccaaatgtgcctagttcaacaccaggatgaagagtttggatattcttgtatgggtaggcactgaggagccagtgaatattttcaagaaagcccatgacctgatttctgggttttttttgtttgttcgtttgttttttaaatcacttgtgtaatacagcttggaaagccaagaagggcaggtgcattcattcatgtattgccaaagactacactgagcatatccatgtcctgggttctgggattccatggtaggcaggagacatggccacagtgattggcagcctgtccctccatccatgctctccttagcctctctctaataagcaagaaggtcataaccacccccaagccccctccctttccctcaatactgtcctgggcccctccctgcagcctccagggacaatccaggtgcctgaagcccctggctctcgggtttctgcgagagagattctaaagggttcttcctgaggaggaaggcagccaacaggatctgcaggggcacaatgggcccctttattgctttgcccagggccactccaagaatagctgtttgctcagctcagaacagggctggtgctggggaataggagggtgtggggccctggagctgcgatgtgggctgggcgttaaccctctggagcctctgaggcctcctttggtttctctctggtccagaggaatgaaggtgggcaggaagcatcacttacagtaactgagtcagggtcctaaaagatcatcttgtaaaacattttttcctaaatagaattgtgtgcagaagctcaatatataaaaccagatgaaataatagtggctctgggtcaggcatggtggctcactcctgtaatcccagcactttgggaggccaaggcgaacggatcacttgaggtcagaaattcaagaccagccaggccaacacagtgcaaccccatctctactaaaaatacaaaatttagccaggcatggtggtgcatgcctgtagtcccaactacttgggaggctgaggcaggagaatcacttgaacctaggatgcggaggttgcagtgagcagagatagcaccactgcactccagcctggatgacagagcacgactctcagtttaagaaaataaataaataaacaatagtagtagtagtggctctggttaaggtggggaggggagtggcaggaatccagtggagatatcccaagctttttttttttttttttttttttttttaatagacagagtctcgctctgtcacccaggctggagttcagtggcacaatctcaactcactgcaacctccacctcccaggttcaagtgattctcctgcctcagcctcccgagtagctgggactacaggcacacgccactacgctcggctaatttttgtattttttttagtagagatagggttttgccatgttggccaggctggtcttgaacttctgacctcaagtgatccacccacctcagcctcccaaagtgctggggttacaggtgtgagccaccgcacccagccatccccagctttccagagccttcctcctcacccctttgcccagggcctctcctctgcactctctggactcagccacctctgctctggttccatcctctcacctaacactggatgaaactgagagagggaaagtccctggcccaaggccacccagcatgttgatgggcaaagctgagacttgcaggagaggaatgcttcccagacctgaggccatagtttcccagactctcatggctttggccaaaaccatcttcaacctgtctcactataacacttttctttaacccagctcacatttttcttaataactttattttaaacagagattttatagcattaccataaatggcaagactttatcagtcaccataaaaagatactgtgtttgataaacacataagtcttcttgtagattgttcctccctgtgccacctaaagcatccagggtgtgtactcacacctctccttgggaacggcttaccttccgtccgactcacctctgccctctttgcttgggtgtatgatgggccaagccctgtgctaggctctgaagaatgaagatgggagaggccggaccatgccctcaggggacttataacccaaaggagggcaggtaccacgtggcaacaccactcagcaaaacgtggccccagccctagggggagtgagagacgagagctatgggcaggagggtggcagtcctcctgaggcgtagggactaacagatggacattcagaaggtgcagaccccctcaagtcaggggcaaaactagactcaaacccaggtcctctgcacgtgcacccttagtccagggcttttgtccagactctgtgcccctcttaatgatggatgtggccaggcacggtggctcacgcctgtaatcccaacactttgggaggccgaggcgggtggatcacctgaggtcaggagttcaagaccagcctggccaacatggtgaaaccccaactctactaaaaatacaaaaattagccgggcatggtggcgggcacctgtaatcccagctactccagaggctgaggcaggagaatcgcttgaaccaaggagacagagtttgcaataagctgagatcacgccactacactctagcctgagtgacagagagagactcctcctcaaaaaaaaaaaaaaaaagtgatggatgcggagaggggacagcaagccatgaccaagaagtgtccagtctcacatcatcccaggacaggctgtggagtttggaagggggcaggacaagaaccagagtgaccttggggtgtcttcattgagctcctctcccagcactggccacaggctgccgagtccttcccaattctcctgccagagcccaagaccagtagtctttgcccatagcccctgaagtctgtggcccaggtcagacagacactgcccggcagcctctacagattcacgctcacggccttggccagcccagggctctcagcagtggaccgcagtgctgattgtctggaccagtggttctcaaagtgtggtactgggaccggcagcatcaacagttcctggaagcatgttagaaatgcagattcttgggccccatgccagacctcctgaattggatgctctgagatggggccccgcagtctgttttgacaagacctccaggtgccgccgccccagacactgctgctgcactttgacagccgctggcctacacttgtcattcaaccctggccactgtttccatcttcagctgccccagcaccctcagcctctgccatgccagccagcctctccagagactggatctacaaatctacagccttcaaagaaaaacaccctatagatttaaacagcacccctgatgattctgatgcctgccatagttgagaactcctggaacccaagagcaccaggcccccaaaatagcagctgtgcctttgagacaggcttacacctatgtcttagtcacaaatcccacgagaatcccacctaagtccctctgagccctcttgggcctccagaccagtggctggatttagcaaagccgccagccctaggcaccttcctcccttagtcccctgtccttcctgtcacctctccttaagccaacaacaaaacaccatggacagggtggcttaaaaacaaattcatcttctcacaattctggaggctggaagtccgagatcagggtggtggcatggtcggggttctggtgacggctttcttcctggcctgcaaatggccaccttgtcactgcgtcctcacaagatctttcctcagtccatggagagagatctctatctacctatccctccctctcttgctgctcctcctcctcctcctcctctctcatctttcttctcctatttgattagaagcctgcccttggccagggtggctcacgcctgtaatcccagcactttgggaggctgaggtgggtggatcacctgaggtcaggagtttgagcccagcctggccaacatggcgaaaccccatctctactaaaaatacaaaaattagctgggtgtggtggtgtgcacctgtaatcccagctactcagaaggctgaggtaggagaacagcttgaacccgggaggcagaggttgcaatgagctgagattgcaccactgcactccagcctgggagacagtgagactccatctcaaaaaaaaaaaaaagaagaagaaaaagaagcctgcccctatgacctcacctaaccttaattacctcctaaaagctctatctccaaataccatgacactgagggtgaaggcttcagcatgctaatttggggagagacaaacattcagtacacagcagccagatcacatccatttgttctcctgctctgaaatactttcggagttcttgaatttcggaattcaagaattccaaaagtatttgctttgcaatggaaaaccacttttgaaccccaagaaatgactcagaaggtgggggatgtcaggtggcaagaaagctgtggcaggaaggaagggatctttgtaacaagagacaccccacctctgccctgttaggacccaggcactgggctccatccctgtgaggactcagcactttactcagcgaccctgggcagggagacagggttccaggcccagctctgctagtggagcaaattcattcctgcctgggtctccatcttccaccttcacaggaccctgtggctcccaaaactggcctcccatcagaggcactaggaaggttgttaagaattcagatccccaggcccgaccctcatacattcacactcaggaggtgcaagattggcccaagagatttcatgttcaacagatgtcctcttcacagccaggtgactgcaatgcagctggcccctttggggtctcccagatcagattacctgtgggggcccttgcagacttgcccctccagaagtcttcttttttgaaaaaagagccgggcgtggtggctcacacctgtaatcccagcactttgggaggccaaggcaggcggatcacctgaggtcgggagttcaaaaccaacctgaccaacatggagaaaccccatctctactaaaaacacaaaattagccagctgtggtggtgcatgcctgtatcccagctattcagaaggctgaggcaggagaatcgcttgaacctgggaggcagaggttgcagtgagccgagattgtgccattgcactccagcctgggcaacaagagtgaaactctgcctcacacacacacacacaaaaaagaagagacagggtcttgctctgttgctcaggctggagtgcagtggcacaatcatagctcactgcagcctcaacctcccaggcttaagcaattctcccacctcagtctcctaagtagttgggaccacaggtgtgcaccagcatgcccagctaattttttaatgtatataaagacaaggtctcactgttgtccaggctggtctcaaacgcctgggctcaagtgattctcgggctttgacctcccaaagtgctggaagcaggagtctcctcttgaagcccctcatcccacctaccccagggctctccctaaccctctctcatctctccccacagcgcggccccagccggggcccaaaccttcagcctgaagcactcggaacacgtgtgggtggaggtggtgcgtgatggggaggctgaggaggtggccaccaatggcaagcagcgctggcttctctcgcccagcaccaccctgcgggtcaccatgagccaggcgagcaccgaggccagcagtgacaaggtaccacggcgggaagtccagcctctgcgggcccgggaccatgccaggatagaggcagggtggaccagccctgtcccatagaaactgcacgtgggccatgtgtcattttcagttctgcagtaaccacattgaaaaggcaaaaagaggccgggcgcagtagctcaagcctgtaatcccagcactttgggaggccgaggcgggtggatcacaaggtcaggagatcgagaccatcctggctaacacggtgaaaccctgtctctactaaaaatacaaaagattagccaggcatggggcgggtgcctgtagacccagctacttgggaggctgaggcaggagaatggcgtgaacccgggaggcggagcttgcagtgagccgagatcgcaccactgcactccagcctgggcgacagagcgagactccgtctcaaaaaaaaaaaaaaaaaaaaagaaaaggcaaaaagaaacaggtgaaattaattgtcttaatatctattacttaaccctatctatcaaaatattatcattttgacatgctatcaatataaaaaatattaacaaaattgtttgttttttgtttgtttgtttgtttgagacggagtctccctctgtcacccaggctggagtgcagtgatgcgatctcggctcactgcaagctccacctcccaggttcacaccattctcctgcctcagcctccagagtagctgggactacagacgcctgccctatgcctagctaatttttttttttttttgtatttttagtagagatggggtttcaccgtgttagccaggatgctgtcgatctcctgaccttgtgatccgcccaccttggcctcccaaagtgctgggattacaggcgtgagccaccgcggccggcctgtttgtttgtttttaagagacaggatctcactctgactcccaggctggagtgcagtggtgcgatcatagctcactgcaacctcaagctactgggttcaagcagtcctcctgccccagcctcccgagtagctgggactccaggcacctgccatcgtgcccagctaattttttttttttttttttttagagacaggtcttactatattgcccaggctggtagtttatattctttttccataccaaatttaaaattagtgtgagttttacaccttataacacacctccgttcagaatagccgcatttccagtgctcggtagccatgtggatgttgtggggttagaccatggaacgatggcttcgtaaaggatgaaaattatagacagctgagtgatagaaagtttagaggctcagaaccatagaatcattggagcttacagtcacaagtgtccttggtctatctgtaaaatggggtgctgaacatccatgggtgatttgcctaagtggtgaggctgagaccagaactgtctcctttctgggttccgtaattatgaactttaccatgtgccccatcacagtgatggcattgaacatggtccaaagaaaatagcctcagccctgtcccctcagtgggcactagacgtgcaacatggcagatatgggggaccccaggcagcagaatgcacacagtggcacaggaaggcagacagcatcctaactgccctctcagccagcaggaggggagtccacagtctagttcagttacctgagggaaaccgcccaccaacccaggagttcttcctggaggagagggttctgatgtttggagagggttggcttgacaagctgtgagggacagcagttgcttcaggttttcctgcttgtgatctgtgatctctgctctcttttctctctactccaatgtgccccctccccaccaaggtcaccgtcaactactatgacgaggaagggagcattcccatcgaccaggcggggctcttcctcacagccattggtgagttggcatggttgccgtctcagtgccttcatcacccagggcctggcactgttgtccttctctggggcacttaggcggttctcagtgcggctgacctggcacttggagcttcttctgaatggcacaggcctggggagggatgtcacatgtgccccaccccggtccttccatactggggtgggggcttatctgcaggaagaggcactccctgatccatcagcaacccccccccaagtgtcaaggtccccttcccaggctctgtggccctaaaagagaaaaaggtgaagtgtgtttccccctgcctctcccctgcagcctggagaagagtgtccctctcatggtgaggggaatggccacagtctataaaactagcagctgttcttgacaatcccagctgccccctggttctccccagattcagccccgagggtgcagagatgcagcctccaggtccttaactcacctagtccaagtccttcatttgatccacaggatggtgaggcccagagaggttagggaatttattcaacatcacacagcaactgggtggcaagttgagtccagaacccagaattatccctgtctcaggttctctccattgcatcacactgccctgcgctgggtgccaggcctgcatgccagggaggtggagcctagcctggctctacaggacccttggctgtgatcatctgaattttccatcactccaccccctgaaactgaggcattacttttatgctattttatttcattttttaatcatagaatgttaaagccaagaggacatttcagagggtcattttgttcatccaaccttggtttaacattgacagagttgccgcatggcagaggaagggaactaccagttattgagagtcaactgcatgctgagtgctttcaaaataatgatgcggcctgcttattgcaggcctactgtgtgtctagagctgcactgggcactttgatgaggaggaggagggggagaatggtaaacacctgatattaattgagcacctatggtgtgccaggctccagtactcaatgttttaccgtcacgatttcaatctcttcttccaactattccaaggatagatattattattatcatcctcattttatagatgagaaaatcaaggctcagaaaaggtaaaacaaatacttgcctgcagctacatctccagaaaatggttggtgagatgccaatcattccagttatcccacattctcagggggggtctcagaatctccccaagatacaactaactcccgagccagccccttcctctctagccctgtgctctcagctgcttaaacaggcttagcagcagggcccttctcattcttggctaattcccaaatgggcttggttgctggtccccctgtccctctttctgtcccaaggaggtgcccagccctggggtagggaacctcgggatgaccttggtgagggtggcagatgatcaacaaagactcctgggttgtactgagccctggcacgtgtgtgaaccttgcatgcacacagcatccaggcagtctcagatgacagtccctgaggaaacctaatcccaccaagatagggacacctgaggacgggggcaggaagggcaggggcctgacacctgtcaaatgaggatgatcccagaaggctgactgcaccattaacaagacttccaccaaagcaagacagacttaggatagatggcaaaataagcgtctataaggaggcaggactggacttttcctcctcactaggagatgacaaagctgtgcttagaggaagcccgctcagagttggcggcatggctgagtcccaaaagatgccacatgtgcccacgacaagtgaccaagttcatccttccgaggtctgttaataattatttatttaactgccacaagttccagatatttagattccatgggccaatcaaatgtcccctgcccccaccccccaaaaaatgagaacactaacaactttgatgcttggcaaaaaaaagaaaaaaaaatacatcaataaaacaatttgtggccaggcgcggtgtctcacgcctgtaatcccaacactttgggaggccaaggtgggcagatcatgaggtcaggagtttgagaccagcctggccaatgtggcgaaaccacatctctactaaaaatacaaaaattaactgggcgtggtggcacgcacctgtagtcccagctactcaggaggctgaggcaggagaattgcttgaacccaagaggtggaggttgcagtgagccaagatggtgccactgccctccagcctgggcgacagagcgagactttgtctcaaaaaaaaaaaaaaaaaaatttgctatcaactatcactatcattttaactcttaaaaaataggcaaggcataatctcagaataaaagacagtcatggccgggcacagtggctcacgcctgtaatcccagcactttgggaggccgaggtgggcggatcacctgaggtcaggagttcaagaccagcctggccaacatggtgaaaccctgtctctactaaaaatataaaaactagccgggcatggtggtggacgcctgtaatcccagctactcaggaggctgaggcaggagaattgcttgaaaccaggagacagaggttgcagtgagctgacacagtgccactgcactccagcctcggcgacagaatgagactctgtctcaaaaataacacaaaacaaaacaaaaaacagaataagagacagtcattcaattgcaaaaagaaactaacaccattgaacttctgtttcctgttccaacagagaccctggtgaaaatctggtttcccttggggaccactgttctctctgtcccttctaggttttctcttttctcgagcatctgccccaggagcccttgagcccgtcatcctgagtaatcaatcactcaggggcagcgcctcagaggcaagcccccccccaaccccaatatcttgagaggctgggactgtcccctgggcacaaaaatgtatctgaatctctctcaccctggtcctatcctgagtccacattgagcagaaagagccttggcttctgggtagacagaagtaagcctaagatctttctctgtcccctccagccagcttgtgacaagtcacatcatccccctgagccttggcttcctcatctataaaatgcgcttcacagagcagccttgcatggtgtttacaaggattcagtgggatgttgtgtgcgaagggcccggcacagagtgggtgcttagtcaatgctccgcctgcttttctctcttgctcttgaggtggccgcattttctctctgcctgggtgaagttaaagaaatgtatggtctctccttcttccttctgggatttgggagcaaattcatgattcctttggccagatcaggctctgggtctttgtcccaatcccgccaaggacttgctgtgtgaccttaacaagtaaccacccccactaggactcactttttacaaactataaaataaggggtttgagctaattaatccctaaggaccttcaagaccctggttagggttgatttgcaaagacttccattttttgggagggatgggggagagcaagaggtgaggtgtggggagggaggaagaatcccaccctatttgaggtcctggcagtggaaggagtacacatatgcgggccccagaaaattttaacatcaacctaaggggcttgatcctatgccttctccccagaggctgggatacttgccctgattggctgtgggggagggtgtccttccttcccataacatctcaagctgcttagtaaggcaagaaggccaggcaccctgccactctctggcgaccctccaaaatgcttgtgcctctcggtcagagctgaggcttcagtgtcttcattctcagggcagactgccttgaacccaatcctagggacatttcccgtcaatctgccccacacccaggagccacctgacgccttggggctattctggggaactgaggtgggatccagagcctctgggaaatgtcgtctggagcctggaggccctgaagcagagctcctctccctcctccccctcgggaaggcagagccatcccaagaggcaatgctctgggcaggtcacaccagccctgttctctgcccctacccgcagcatcccactggaatctagttaaatcagacattgggggaagccttgcaggggcgaagtcccatgggcatgactacagggtgggcggtctctgagggtgaaggggccagaaggtcatttcagtggattatggggacaggtcatgggtcatcagagaggagttatgaagccctgtgagaggctgggaggacgataagggagccacactgtgaaatgcccacatttcgtaacaggaaggtaacgaaacctgtctgaattcagtaaatcaggaaatcgcaataagcatgagagaggttgccttaggcagctgagaagaagggctggacaaggaactgctgtctttctttagaaacagtgtgttactattttatttgattttgtttgtactatgtccaaatattacatgaataaaatgtttccatttaagaattcataatgaaatgaagcagtatagactgcaccataatttctctcctagcccacggccccactgctttaatggactcgccacaaggagtcccaatgtaatgtcaccttacggcctagagacgaaggccgcagggctaccaaggtggggaaatgggcacttcctctgggaatgaccttcaagggagcaagtcttgtgtctttgactttgggctgggcttttggaaacagcttgcagggaggtcagcctgggttcattgcagggaacagcagagagcaggcagccggagtccgaggccctgctgagagcctggctctgcgttctgggaacttcggtggtcacttccctgctgcgggcctgggtttcctcatctgtatcgttagggggtgggggtggtcacgcctcccctggagtggccgagagaacacaccttggaaaacgctgtgcagctgcagagcaggatgcccgcaggggagaaatttttaccttgaaaaggacagagtggctccctaaagaggctggacctgcggctccttccgagggaggagtttcaggaagccagctccctgaaaggcagcattcagtggacgtgaccggctggaaagttcacaaaggtccaggaaccaaaaccagtattattcctgcccctgcaccccaggctcttagcccctggtggtaccgccttcccttctttcccctggggtccttatcctgcaccagcctcccagattaccagcccgatttgctgacaagtggcttctctgaacctgggtttgctgccctgtgaaacgagagcaatgctattcatctcatgggactgtggacgccttgagagcaggtgctgtgcctccattgcccgttgcctggtacagctcccggagcagtagctcctcagcagtgaaatgtggagtgaatgcgatcggagggaggaggttacaaattatgccttacagcacctaactcaccgcacagctgcagaggctgggacacacaagactgcctctctcaagggccaggcgcccttgcagcctccttctagactggaaaagtcacatgcaggtctagggtatgcaggctataggcaaagggaggacctgaatgtgatctctggactctgggcttggttggcccagagaagggtgacatcagtgcacttcgtgtgccaggaccctcctttccatgccctccaggcagagggtgtgcctgccacggggactaaccaggaatgcattcattaccacccagcgcccaccaggtccaagtcatgctcagcgtgagatgagcccactcgggcagctctggggacctggaacgggcacatgtcatgtgtgtgacactcccaacaccttcccaaccacatccctactcgacctcatccgtctccaactcaaggcaatttcgcctcccaagggacatttgacaatatctggagacatttttggctgtcacgactgggagggatgttactggcatctggtaggtagaagccaggagtgctgttaaacatcctacaatgcacaggctgcccccacacaaagagttatttggctcaaaaatgtcagtagtgccttccattgcagctaatgcatctgctgtaaccaggaagggccccatgttacaagtgaggaaactggggctcagagaggtcctctaacctgcccaaagtcacacagcttataagcagagaaccagggtctaaaccccaccttgtctgatactaaaccttttcacttccctacagtctccacaaagcctgtctccatggcaggcctagggatgctgagggtcccttcaccaagagaagggataagtgggggcctggccctggatcctccatctagactcacaggtgacctcagaccaagaggggttagagacagcttcccacccacagtaaaaccctcagtccttgaaggtgggatctagcccactggaagttctgggagagaaagagacacgcacacccaggtgcacatgtgcacacctatgcgcatgcccgggtagactgagaaaggcagtttgggaatgctatccctgttaagttttcagaatatgaactatgaatcagaccaaccgcactgtgtaccccagttctgctagcgtccctatgtgatcttgggcatgcgacttcacctctgaactgaggcatccagatctgtgcagcgaggatcattccccaacccccagccagaacaatgaagtggtaggaggtcccagacctccccgatggcagctcttgcagccgtaagctacgaggtccacacggtgtctgctgacggtctccagtgggtagtgggatgttgaggcagggggttgcataagatgacttcagcgaggtcctctctttcccgtgaccaaatgaatggctgagacgcacccaaatcccacaggtcttcctcttgcccctgccctgccctgcctggcaggctcagcaactcacccatgtctcttctccccagagatctccctggatgtggacgcagaccgggatggtgtggtggagaagaacaacccaaagaaggtacctagctttcagggcaggcaccaccctgaacccagggcttccgagggcacagccccagatcccgcaggcaattcccatttcacagctcaggagactaaagcccaagacaggctcccagacacacagcataccaatgatggaacccacagaggagctcaggcatctcctagagacggcaacagagcaggctcctgagtctcagtttctccatcccatgatggggacgcccaattcatggaactgctgggaaggataaatgtgcccgctacagaggaagcactgtgaaggcatttgctcttattattttgcctgttcttttaagactagggaggtgggggagacagaccctcaggacagagggtcgcattcatcattctcagttccaggcgtggtattatctctgctggtgcatgcacggcccctctcctctttctatttattcttgcattcattcaccattcattcatttgttccctcgttcatttacttattttcttttatcttgcattccccactcccattctgctcccccacagaggaccattttgctgggtttaatgtgtctctttctgctctggtgactctcaggaggcatgtggtgtggttggtgtgcatgtatttttaatttgtgcagacggcatggtgttctccatcacattctgttttgtacttttccctcaacctagtttttaggctccatcagtcttgctctgtgtacattcaggctgttgcttctaactgctttccattttctgcccttctgtattatctcaatttttgccatgggcatatgtgacttttataataacactctgaagcctagagtaaagtatacatagaggggtacttacgaagtaaaataaacacagcctgatgagaagcctgggtcctagcagcctgctaccctgactctctgcaggtcaggagagggttctcagccatgtggggaagtcccttcttctaggatcgtgagcaaggcttgcctgagaccagggccagccctgcacactcattctctgagtctatggccaagccatatgagaatgaactccacagaggcctctgaaacccagcagccccagggcgacagcttccaacctcccccaaggggctgggcagtcttgggaaagtcacacgatccccatgagcctgaacttggccagaatttttaaatctgggccggtgaagttttcacattttcttcactcatcccataaatatttgctgagcatcttttatgttccaggagcgggtcaggcccaggggacacagaaagaacaagagaaacacagccctggccttaaggagcccatggtccacattaaatatggagtgtttcggatagctgtgtcatcacagttgtcctaagtcctcccaaaaaggatgtgtacagggccaggtgtggacccggggaagctgctctgtcctagagaatcagaaaggcctccaggaagaagagacagtcatgctgtaaccgaggaagggtagagtgggccaggtggaaaggggcaggacaggagcagagggactggcataggcaaaggcctgggagcttgagtcttttgggagcagaaaggcgccgggatgggtggggcagagtgagcgaggggcaaggcggaggagatgagacagagaggaaggcaagtttcaccaggccttccaagccacagcaaggaatcagggcttcatgccaactcaactgggagcccctgacctggcttaaagcagggaagcaacacaatctggcccgagtttgttctagtagtgctatggctgcagtgtagaaagtggagcaccatgcaggtcccattcggagcactaggagcgtgtctggaaacagctgggtggcatccatccaggcgtctcctcctgagctcccctagggacctagggacccatggtagaatgtctgtctgctcatttctctggccagcctccacctccctgcctccacccacaccagacaccagctgcaccagacaggaggcccataaatgcctcagtcagccttcctgtctctgtgcctctattgaacttgcctttgatgcccacattcatcctctgtggacatcagtcttgagattcacatttgccaggtcacagctgccccagtgggtggcggctactctttaccctcatcctggggctatctctccagtgtcccatggggtctatacaagcatagagaagagggcactgacctttcttcctgccactgtaggcatcctggacctggggccccgagggccagggggccatcctgctggtgaactgtgaccgagagacaccctggttgcccaaggaggactgccgtgatgagaaggtctacagcaaggaaggtgccagcaggccctgcacttggggggcaggatgagaggagtgaaaagattcatgcccagtcctgggctgggctgagggtgaggcaggtgtggactcaggcctcctggggatggtggacacaaattcccactcttgcttaaagccaaaggcaaaaccataggaaatagacaagggccgggcgtggtggctcacacctgtaatcctagcattttgggaggccaaggcaggcagatcatgaggtgaggagttcaagaccagcctaaccaatatggtgaaaccccatctctactaaaaatacaaaaattggctgagcgtggtggcatgcacctgtaatcccaactactcaggaggctgaggcaggagaatcacttgaacccaggaggcagagattgcagtgagccaagatcatgccactgcactccagcctgggcaacagagcaagactctgtctcaagaaaaaaaaagaagaagaagaagaagaagaataaaaagaaaatagaccagaaggaaattcccaaaaggttaatcatctctagtgttggaaatgacaactggtttttattctgttttatgctttgcttttttctttttctttttttttctttttttttttttttgagacaaggccttgttctattgcccaagctggagtgcagtggcatgatcatagctcactacagcctcaaccccctgggttcaagccatcctcctgcctcagcctcctgagtagccaggattacaggcacatgccaccatgcgtggctaattttttttatttttgtaaagatggggtcttgctatgttgctcaggctggtgtttgtctcctggccttaagtgatccacccacctcaacctcccaaagcactgggattacaggtgtgagccacagcacccagcctctttatgcttttctatagtttccataatacacatccatggggattttttcctgattatcaaagtaaaaggcattgggaagctgaggctccagcaacagatagatctcttcattctcaccttctgtccctcagatctcaaggacatgtcccagatgatcctgcggaccaaaggccccgaccgcctccccgccggatacgagatagttctgtacatttccatgtcagactcagacaaagtgggcgtgttctacgtggagagtgagtgatcccagcccagtccagcctagacctttctagccacctaccctcctccccttagcagttgtggccttcacaggtgcaggtgcctggggaagacctggattggtctctgagtgattgtaacatggcaatgctgttgtcccgtgaagttgaaagactccatggggacacatcgctcctcctctcaaaggagtctggagtgacatgggtctatgtagaacccagaggcccttcctccctacgaatcaggggaggaagggcatttgggcacttcttttctggagtcatgtcaccttcaggatacctgaggcagggcaggcaccacctccaggtattttctgccatctctgactttcaaagaccccctaaagatgcagtgggcacccttgaagagttgaccccttgctcctctcgatggcaacagatgtcctgggcccccactgtgtagggcacgggctcctgccctggagctagtcctcgtagctgccggctctgcctcaccctgtctgtggatatgtgttgagccctttggtgccaggccctgttctcagctttgagatctctgcagtaaacacaacaatcacaccctgccctcaaggagccgccagtctagcaagagagacataatcagtaccacaattggaggaaatgaaatagaataagtgaggagaatggcagggcagaggcaccactagatgggtgcctctgaaaaggcctctctgaggaggtgacatctgagctgagactcagatgaacaataagaaggaaccagccactcgtgagctgagggaagagtgttctaagcagaggcaacagcatctgcaaagcctggaggaggagaccagtttagagtgtgggaagagcagatggaagcccagagcagggctgggagtcaaggtcagtcagctcggccaggggccagagcatgcagactgggtttggattttcttctgagtgcaatggaatgccattagagggttttatgcaagggactgtcataataatgatgtatgtgttttaaaaactccctcagcaaaatagtcggcattgcaatttgccatggtacaaggcgggtcgtggggtggcgggaggaggcttctgcatgcccagctgcctaggggggccaggatctctggcccagccccgaacccacctctagacaggcctactagatccagggcattcaccatgaggtgagtagggaccctggaccctcacatcagggagatatttagccaggatggcagtggccagcagccacccaataccagtcttccttctgatccaccctgggctccaagcagtgacctcacacaggttggaatgtgcccagagtcaggctggctccgctgccgcagggggccggagatgttgatgttgacaccatccaggccagggttgtcatggaggatgggatcaccagtgggagcaggagggatgcaagcaggacctcaacctcggcctcttgaccttggtgtcgtgacacgagacctgttgcaaataatgatgtctggacattatctagaagtttcttctttttgctaaagggagtggactggtctggttccataatctcatccctcctcatcacttgccatctgagatgggtcctgagcagacaagaaaaaagaggaactactaccacaagggctttgagaacgtcccttggagcctcttatttgggctgcccatcctgtggggagcagccacgactgagacagtggggacccagaagagacagtttcccaataatgctgacactgggtcactgggtgaaaactcttagacacacacacacacacacacacacacacacacacacaagcaaaggacgacagataattgaccaggagcacagtctctttttcttccaggcaaacactttggagttatgtcaaattccaggcacccctgtggatgagcgaatgtcaggtgtcctggtagggtcagaccagctctccccaaggccagggggctgggttggagactgaaggacccctatagggagtgctggagtcagggagctacaattctgggtccaggcaagtcttctcaccagccccagccttggggtgctcatctctgacgtggcatgggagtagtaagagttccgactgtcccgggtgtcccggatcgtggtggggatctaatgaggaaggtgtgtcaggcactgagtgcagtagctggcctttggaaagctctccataaatggcaattatggcttttgttgagattatgatgatgactgttagttacaatgattggagtggacagaaggcttcagtgctcctaggaagacctggtaacggccttagcctcaaattctgcccaaaacaccaagcactggggccttacctctttatacaaggaaatggtaatccagtttgcccaggactttccttattttagcactgagggctcctcatgccaggaaacccctcagtcctagggaaaccaaatcagctggtcacactatcaaggagtctcgctgggaagtggaatcattccaaagtagctagaaaggttaaggcaaaccacgtgccagccaatgcctggggcagagaggtcacggtggtcagtgggcccagcccaaggcacgaggaccactcaatagagcggcattgttggttcctgcagagaaagctggccacgctcagtgtggggtttgcaccgagccagggatggaggacggggtaaggaggctcctggggacaatggctgaattgttcccaccaagaaatcagtccgcccggagctggccccaactgtcagaaagcagcccagaatagaggtgcattgtgaatcacaggccacgggccacatcgggagggagaaagctgccggcagacggactagaacgtgtcctccacctgccccaccacccctggccagatccctgttcctaccccagaccttggtggagccccccaggtgctctgagccctgggaaagctttggctgtgtggcttctgccaggacaagttggcttctaagcctgactgtcccctgagcatcagttcaagtgcagcctggggcctgtgggcatgggagggcccgagtgcctggaggaaaatgttttcatgatgccagtctatctgaaactactgactgacagggctgcagggtgcacactattgtttctgggtgagcaggacctcactttctattctttgggactttcagtatctgaatttttccacctcatttcttggactcctccctcccaagggaggatgaggtgggacgtggtttccctgccttctgtttggaaactattcaatgaaaactccttcacatcctcgtaatacaggtccaagcagtgttactgatggttacccatggttactgaggttactgaagttactgagcctgtgtcatttacattgaacctgtggcgtgggtatcattatctcccacttaacagatgagtaaactgaggctcagggaggttaagtgaattctctgaggcttggtttttttttttttttttttttttttgagatggagtctcgctctgtcgcccaggctggagtgcagtggtgcaatcttggctcaccacaatctctgcctcctgggttcaagtgatattcctgcctcagcctcccgagtagctaggattacaggcacgcaccaccatgtccggctaatttttgtatttttagtagagacggggtttcactgtgttggccagtcttgtctcaaactcctgacctcgtgattcgcccgcctcagcatcccaaagtgctgggattacaggcgtgagctactgcacccggctccctgaggttttatagcttgtaaagccagagaagtatttaaaccaaggtccctctgacattggaagtcataaccactaagggaagcacccttagtgagatttataaccagggtctatttcggcacattgtcccacaggaggagccatcccaagccctggcttcgcggttcatccacttatttctcacgttttaatcaagcacctagtttgtgccaggctattcggcttatgtgttctaacccttgagcatctggtcattaaccattatcattgtcgttgaaagcactaagctgaggctgattctgcccttccagctctacagggcataaagaaattccttctggaactgcatagggtcctacctccatgcctttaccaatgcaagtatctcctctccccaacacacccatttctgccaacccgcaagggcatctcaaaggctgccttcctctgctcaaatgcttcccaccgtgcctcttctgccctccccaccctaccccaagtaaccagactggatctcacccatagccgccgttatgacgcttcccacatctgctccatcttatcatcagctgagcactgctgttacagaggctgcatttggaccacctctgtctccccgaaggtccttgcctgattcatgtgctctcaatctgcctgaaaattcccccttggtctctcccacagggaatgttgtgggagtcattggttcgttcagtagacatttgttaaacatgaccatgtgccgggcaggccctgggccccactgggcctgtctctaccctcgcacaggtcacccacatttaaaaaggctgtgatgaggccgggtgtggtggctcacacctgtaatcccagcactttgggggtctgaaggcaggcaaatcactaaaggcaaggagttcgagaccagcctgaccaagatggcgatgaaaccctgtctctgctaaaaaatacaaaaattaaccatatgtggtggtgggcgcctgtaatcccagctacttgggaggctgaggcaggagaatcgcttgaacccaggaggcagaggttgcagtgagccaggatcatgccactgcactccagcctaggttacagagcaagaatctgtctcaaaaaataaataaataaataaataaacaaacaaacaaacataaaaagactgtgatggagatggcaggtggctgtgggagctccaaacagagcccctggctttgtctctggggaaactgggctggattgttgcaagtgacacaaaccaaggcctgaaggaagaagggacacaattgtttcaggcagaggggagagcacaagtcaaactgggagctttcaggagggcaggagccctggaggaacctatctttccgcccagccacaaaaatgaacagcccatgcactggcctttacaccaacacggcttccatgatatggagggaatttttggtataatgggcacatttatggtttgtttatacagaggggatgagagctcgggattcagaattcgacttgaatctgagtcccagctcagctatttactggctgtctgactttggacaagccactcctcctttctgagattggtttcctcatctgtgaaatggaaacaattacatcctcccctggaaccactaactgctcagctggcaatttcctatcagccgttcacgagagagcttgcttattttatagatggggaagccaaaagccagagagggtgactgtctggcaaagcgccacacagccagcacacagcagtgctgagacaatgacaatgacctagccatggccattctggtggcattttctgcttgtgcttttctctctgtctagaggacaagttactttgcccttttgtccccatcggtgatcccaccccaccgacctctttctgatgcgggtgggagtctgacgttggtccttttccctccagacccgttcttcggccaacgctatatccacatcctgggccggcggaagctctaccatgtggtcaagtacacgggtggctccgcggagctgctgttcttcgtggaaggcctctgtttccccgacgagggcttctcaggcctggtctccatccatgtcagcctgctggagtacatggcccaggtgagggctccaggcctccaccacagggggctaaccccaggggccagggtgggtctcctactagtgggccattcctatgctatgctccaccctgctcaaagcgccaaaggggtgggtccaggctaggagacctcgatgccccccagcaaagcctgcacgtgtctgccagggtcctctgagccatgctcctgggatcagtctccttgctgcttctgctccccacggattccctgtgggcaatgtttcctgacacactccacgcctgtgtcctggcctgccctgctccctgcctaggtctaaggcccagagtcctgctgattagcgcgaggctctaagcagccacccaggtggggtttgctgaccacctactgcgcgctctgtacttcctgccccactctgacccctcccccaactgtgggttataccaactctgactgcaggctgaaccccaaatcccagtttcaggttgtgccctaccctggggccaggcatctcagccagccttgctcttgctttggggagaaactggatgaggagaagaggtcctgtccctctagagaagcccccatcactgagggcgtgctgtgctcacaagaatctctatcacaaagacctttcatccccagaccctagcctctcaggcccaccctgtttcgctcagaaaaaaagggaaggacctggctgctctcgcaaacacaagagcccctcatttttatccccaggccactttgggaaaggatacaatgggtgctatagaaaggtgaggctggatctagctgagatgtatgagaatgagccctggcagccgactgcccaggttcaactcctggtttaaccaccacgagacactaggcaaatgaattaaacttcctgttaatttccttagttaagggtagtttgccatagtttctccatctgtaagacagaacgtccaaaagtttctgctgccgggggtggttgtgagcatccaaacttgtgaagttctacttacaaagcaccctcaagctccctgggaagtggaaaaggcaaagctaacaggataggggacggggatggggcttcttatggcacccatgcccagggcagcctgacccccaggatctctcaggcacccgcagagactcaaaaggcagaccacggcaagcaaggcaagccgtgcaacagtcccaccacccccgcacctccccaccaaggatggggtccatttcctatatcttttgaaagccagccccacaaaggaaccctggaatcagacctcactttcccttgggttccaggcaagctgcttgaccattccttaaaacaaaacagtctggacatagcaaaactgacccaaaacaacgcgaaaatgcccacatacagaaaacggcaaggtgccaagggcaaaaacagaggaaggtggggggctggctcagctgttgcgtggggcgatttcaggaagagaagtttgatgggacaagataggacagtggttaagagtgtgacctcagcagctgactgcctgggtgtaaagcctaccatgtggtcaagcacacgggtggctctaccacttaccaaccatgtgaccttgggcggttaacagccctgtgactcggtttccccatctgaaaagtgaggatcatagcagtatctacctcctgcggtggtcggaaggcagaaaagaattggcacatgtgaaagtacttagcacaggcttggtgcatagcaagtcctgaggaaatgtattcactgtcatcagtttcacccgctttgaaaggcaggcaaagaaagcacctgacaaaaccttttgatcccccacgccttgtctcccacacccaggacattcccctgactcccatcttcacggacaccgtgatattccggattgctccgtggatcatgacccccaacatcctgcctcccgtgtcggtgtttgtgtgctggtaaggggtgaccccagcctggagaggcagcgtggcagagtggccaagggccgagtcagatggacatgagtctagttcctggccccgtcacttaccactgtgttaccttgagcaactctcttggcctctctgaaatgcccacatcgtagagtcactgtgagaattaaatgagatgaagcaggcaaagcatttatccaaggcccagcacacagggtatgctctaaaaataatagctgccattctgttctcttgcttaaccctctaccaggcagttagcaacctcctatgcagtggaaatgcagctcatctgactcattcattaaacagacttttattgaccacctattatgagctaggtccacaacagcaagatgagaaccaagggaaaaagtgcctgtgattagatggctagcaacccaaaagggacccttggggtcctcacgtccatcccatcttcatgccaggcagagctcttctttgaaaatctgtggagtcagaggtgtaaggcattgggacaggtgggggtgagagttccccccctcattttatttgttcatgaccttgacaaacgccacatgagtgggtgggtttacttggcctttgattccagcggcctttataaaggtggccgtgagcacaggtgtagactgatctgcccggcacagcccagagataccagctgctgtcaccatctcagggagatgactctggcccctcctcaccctttctcctggcctctccttcttcccccaacttctcagcatgaaggataattacctgttcctgaaagaggtgaagaaccttgtggagaaaaccaactgtgagctgaaggtctgcttccagtacctaaaccgaggcgatcgctggatccaggtaaggagcccaggtccaggctgggaaggacatggcccccgggtcaagcaaagaagagttggcttcatgtgaactgcctggcacccagcagctctgcagatggggattcttctgtcagctcatatctgcacatgtgcacaaagacataaacatacaagtgcactacagtgctgcttcttgtagtagcaaaagattgcaaagcaacctaaatgtccatctgtggaggactgagtaacggccttcccggaagttctgtgcaaccgctaaaaaggatgaagccagtctctcaatatggatacaggatgtgcttcaagttaagttgttactcaacggaaaacatattcaggatgctgcttgctatttgtgtgttttgttttgtttgagacgaggtctcgctctgtcacccaggctggagtgcagtggcatgatctcagctcactgcaacctccgccttgcgggcttaagcaatcctcccacctcagcctcccaagtagctgggactacaggcatgcaccaccacgcctggttattgtgttttttaaaatgaggtctaggccacgcgtggtggataatacctgtaatcccagcactttgggaggctgaggtgggaggattgcctgagaacaggaattcaagacatgcttgggcaacatagcaagaccctgactccacaaaaaaaaatttaaaaattagcctggcatggtagtgcacacctgtagtcgtagctactcagaggctgaggcaggaggaccgcttgagcccaggagtttgaggctgcagtgggccataatcatggcactgcactccagcctgggcaacagagtgagaccctgtctcaaaaaaaaaaaaatggggctgatatcggtaagaaacctgcctgtgatgtgcagagactgcctatggacacctgtgctgccatcatcagtgtgaggggaggaggatgggggaccagggaatggggaacaagacagacgttcttcttcctttgtgctcttgtgtttctcgagttttctgcccatgtgcacaaattgtcccctggattcgtctaacagttctccttggtgtccctgcaggatgaaattgagtttggctacatcgaggccccccataaaggcttccccgtggtgctggactctccccgagatggaaacctaaaggacttccctgtgaaggagctcctggtaagatgctgagggccacttgcgggtggagcatgatcctggagattctcataagacagagtggtcaggagaccctgggccgccttgacacattcatctgctgcccagagcctctgtttctcctctgcaaaatgagtccacttgggatagctgcctctgaggtcctttcctgctctgataactgatgtttttccaaaacatagagagttttctagtgggaaatgggaactaagggaaatagagttaagacctagttccagaggccctggcccctgctgctgcccttcccctccaaattgcagcaaaatgagttaagtttcaaagaggaaaaaaacatagttatgcaattgtcaaaagtcatggttccaacttccaagttcatcagcactttgaggctatggtttttggtgcgtgtgtatgtgtgtgtttgtttttgttttctgagacaagagtcttgctctgtcgcccaggctgaaatgcagtggctcactgcaacttccatctcccaggttcaagcaattctcctgcctcagcctcccaagtagctgggattacaggcatgcaccatcatgcctggctaatttttgtatttgtagtagagatggggtttcaccatgttggccaggctggtctcgaactcctgaccccagatgatccacttaccttggcctcccaaagtgctgggattacaggtgtgagccactgtactcagccatgttttttgtttctttgtttgtttgtttgtttgtttttaagtcatctgactcctcccattctggaagccattctcagtccccttttaggcccttgacaacctagtgtgtgaagttagaaccgaaaccaatctttcttttgtctgcactcttctgccctgaacaggctgggggaggtttgaacagggcatgaaacaagagactggaatagatcaggggacttttcccaaggtcacatgcaggacagcattcctgtcagacgccagggctgcccagagctgaccctgtgccaggttcacacctgttctgccccacattccttacccagtgccctgttcacaaggagatgctagagccaatggtgtcagcacagagctttggaatgtcaggtggacccggtcttgagtcctaattgcacctcttagcagccatgtgaccttgggcaagcaattaccttccacgagcctcagtttcctcatctaaaatggggatagaaatgatatcagtctcacagaatgttgtgaagattgaaggcgttgtataaggcatcagtgccatgtctgatataatgaccattattagctgttgttatggttatcattccccgggccctgtccttagtgagcttattgtccactttccctaacactatgatgagtagagtcaaaccaaccaccagcaccagttgccacaggcatgagaagcgaggcctttccaggtcaccacctgccttcagtattccaggctggcctggttccaaggccccaggctgcgttgttccttgaggcccaggccaggcccggctttgtgctgcatacctgcccacctgtatggtgctgcagagccccagcaccccagccttggcaagctcccatgttgccagctggggccccaagatgagaaagcactaggctgctgccatctaccccatgggctcagctgtccctggagcctctcagctgagccaggataagccacatcctccgactccactggattttgtaaggcaagcttcatcccaaccccagtgcaagctcccaaacaagattcctatatttgtaccccaaaagccatgagaggaatgttaaaattcaggggccaatggggttatgacttgcgggctaactccaattttttggagctctgtgtgaagaagggttctgaggcttcctctgggctcagtggcaagtctggcaggttgagactgggttgagatgtcatgtatattcatagctgccacttttgcatgtattggtcagcttcaccaagtaacaaaccaacccgaaatctccatgaccgacaacagcaaaggcctgtgtcttgctggcattccatgttgattgctgctggtggtctgccactctgcttctttatgccttccttactctagcgctcaaggtgccagagcagccccagtctgggaaatgccattctcctagcacagggagaattcaaagagttggcagacacacgtgggggctcctgtggcttctgctgttcactggcatgcatcccttctgctcacatttcattggccaaagcaagtcacgtgaccaagtctgacactgggcagggaagtatattccttttgcaggaagatgccagaagtcacatggcaatgggtcaggatgcaaaattctcttactgcgcagagggtagcaaatctctggaaataataatactagctgctccccttcctcaggttacctaatctggtaactctcttatagatggggaaacgggctgggcgcagtggctcacccctgtaatcccagcactttgggaggccaaggtgggtggatcacttgaggtcaggagttcgagaccagcctgggcaacccagtgaaaccccatctctactaaaaatacaaaaattagccaggggtggtgcttgcctataatcctagccactggggaggctgaggcaggagaatcacttgaaccaagaggcacaggttgcaatgagctgagatcatgccaccgcactccagcctgggcgacagagcaagactccatctcagaaaaaaaaaaacaacaacagatggggaaactgaaagtgcatagcataaaatgcggactaattctgaaatcaccaatatgtatctgtgcttgggaaatagaggcatacacaggaatgcagatgcccacacactcacattcacactcacactcactctcacactcactctcacactcactctcactcgcactctcacactacaccgagatgctcacacactcagcctccccatgcccaggcccctgctctttgttaatcataggaagaccgtggacaacccacctggaaactgggtgcccacagacccagactgaaggtgataaaagagggtggctggcttgggggctgaggaccctggctgcagaagactaacgcaggtgtgtgccctctgcctagggcccagattttggctacgtgacccgggagcccctctttgagtctgtcaccagccttgactcatttggaaacctggaggtcagtcccccagtgaccgtgaacggcaagacatacccgcttggccgcatcctcatcgggagcagctttcctctgtaagagaagccaggctggggctaggggctgtgggagtggggaagtcactgtttctcttttggggtggcctgggttgctcacacatggagcaagtggctgggggaattattccctcccacgacttcctgttaagaggccgacactcttggaaagaaaatcaagctagcctttatatctttgtgtgatttaggatctaatatataactaaataaacaactcttttccccaagtggaaaggtgtataatgagattataaatcagctggttggtggggcacggtggctctcacctgtaatcccaacactttgggaggccaaggtgggcagatcgcttgagtccaggggtttgagaccagcttgggcaacatggcaaaaccctttctctacaaaaaatacaaaaattagccaggcatggtggcatgcatctgtagtcccagctactcaggaagctgagatgagaggatcgcttgagcctgggaggtggaggttgcagtgagctgagatcacaccactgcactccagcctggcaacagagtgagacctcatctcaaaaataaataaatagataaataaataggctgggcacagtggcccatgcctatagtcccagcactttgggaggccgaggcaagcagattgcttgagaccagaagttcgagaccagcctggacaacatggcaaaactttgtctttactaaaaatacaagtattagcaggcatggtggtaatcccagcttcttgggaggctgaggcatgagaattgcttgaacctgggagccagaggttgcagtgagctgagatcatgccctgcactccagcctgggtgagagagagactctggcaaaaaaaatcaggcctggtgcggtggctcacgcctgtaatcccagtactttgggaggccgaggcgggtggatcacctgaggtcgggagtttgagacctgcctgaccaacatggaaaaatctcgtctctactaaaaatacaaaattagccgggcgtggtggcacatgcctgtaatcccagctactcaagaggctgaggcagaagaatcgcttgaactcaggaggcagaggttgcagtgagccgagatcgcgccattgcactccagcctgggcaacaagagtgaaactgcgtctcaaaaaacaaaataaaataaaataaaatattaaataaatcagctggggaagggatggaggagtccagagaaggaaaactgacaggtatgagtgggagcgtaccaatgaatcctcagggctaccatacttaaaagaggtatgagcagacgtggtcctgccccagaaatgtgagtccctggctccctggcctgtccatgattctcctcactccctgcccagttgacccaccagccagtgaaaagacagattcttccttgtcagggcagtcgctggggaaagagtgaataccttaggttctcacgtcacaaaagggctgccaggagcctgcacagatggggtcagccaggatttggccgccagtttcctccgagccacatgggatgctcagccttctgcggggaggccactggcacagccagcgactgtttgcccacttttgcctccttctccctccactcagtggccactcattcactcagcaaccatttcctgagcaccagccaagtgccaggccctgtgtcaggcacagggtcccaaacaggaagcccagcccctgccttcaaggagatagcagaggtctcaggcatgcaaatagaccctgatgaaatggagggacttgcaacgatagaaagaataacagggagtcaggtcagcccagggagtggccctgaaccccctcgaggagctcaggggcggcccttaaagacaaatatttattgagaaactactctgtgccaggcactattctaggctctggggatacagcggtgaccagaacagatgaagtcccagctctccgggagtttatagttgggtaagggcagtacagaaaataaacatggaatcaagtaaatcaattagataattctgaatgctgatacatgcaatggagaagataaaacagggtgacatgataaaacattcctggggacaggggtgccttagctgttgtttttttgaagatgtgactagagttgaggcttggatgttaagaagtaggcagccatcaggagattgtaaaggaagcgcattccatacagaaggaacagcaaagggaaaagccccaagggatagcaagtgtagcaggtggctggagcagacagaaccgggggaagggagggaagcgagggaggagggctggccaggagccagatcagaaaggaatttgttggccaccctaaggagctagggttatcttcggaggataatggagagattgcagaccttggggggtctagaaatgaggaagggctggccgggagcggtggctcacacctgtaatcccagcactttggaaagctgaggtgggcagatcacgaagtcaagagatcgagaccatcctggccgacatggtaaaaccccatctctactaaaaatgcaaaaaaattagctgggcggggtggtgggcacctgtagtcccagctacttgggaggctgaggaaggaggatcgcttgaaccagggagggagatattgcagtgagctgagatcatgccactgcactggtgacagagttagactctgtctcaaaatacaaaaaacaaacacacacaaaaaaagaaatgaggaagggcttcctggaggaggtttctcttgaactgattaaagattaaagtaagtccaggcacagtggctcacacctgtaatcccagcagtttgggaggccaaggagggcggatcatgaggtcaggagttcaagaccagcttggccaacatggtgaaaccctgtctctactaaaaatgcaaaaattagccgggcgtggtggcacacgcctgtagtcccagctactcaggatgctgaggcaggagaattgcttgaacccgggaggcagaggttgcagtgaaccaagatcatgccactctactccagcctgggcaacatagcaagactccatctcgggggaaaaaaaaaagattaaagtaagtagaagttaatgtagcaaagaggcacatggatgagggcagattttggagccctcctgtgccctagccccgtccagcaggccaggtgggactcccgcacacaaaaggtagcctctgcacactcactggcaccctcaagggctgaagcctgggctccctgcccttcacacaggccgcagctgcaactcacacctactctttcccctgggactcaaacgccttactgcctgcgccagggtctcttaacccaacctagtctccttcctgggacttctctgctgatgtcactctgggtccgaggtgggtcccagagaccaaactcctcttgcaggccctctggtgcggtgggtaatttgctgaaactcctcttcctcccttctccaggtctggtggtcggaggatgaccaaggtggtgcgtgacttcctgaaggcccagcaggtgcaggcgcccgtggagctctactcagactggctgactgtgggccacgtggatgagttcatgtcctttgtccccatccccggcacaaaggtaagctagcctcccgaggctggagtgaatggggtagcagcaaaccaatatattacccgcccctgccagcagagggcaagagctagaggaactcgacagcataaaggaaggaggaagtaggctgaagctggtttgcatgttgttgctgtggcaggtaaaattttaaccccataaatccaaaatgttagcattgcaacacataatcagcctaaaaattattaacgagagatttaaattcttttctcatactaaatcttcaaaatctggcaaagattttactcacatgacacacctaaattcagactagccacagctcaagtgttcaatagtcacataaggctagtggctattgtgttggtggtaatgctctagagagaaataggttatgcacctgtggcactggaaagaggttctttcattttcttatgggtacaacttcataccctggaaattctctgcaaattgtgtggctgcttggcaacttggagatgtcctgtccaagtccacctttgactctgagccttgatctggtgacattgctgaggtagaggaaaggtgagaaatattcctctgaagcagagaacaccctccccgtcagcctttgccactcggcatgggaggcctgaggcaatgagcaggcaaggcactgggtcctcagcgcagggcctccccgtgctccttgggtgccttcccactgctgactctgtccctctggactgtctcttgcagaaattcctgctactcatggccagcacctcggcctgctacaagctcttccgagagaagcagaaggacggccatggagaggccatcatgttcaaaggtgagtggccacagggccttgacaggaagtggcgagctggaggccccagagagaccctcgggagggtggggcagataagcactttgtccctgagcacccagctccacttccctgggtgtctggcccgatcgggggtttgtgaggtcgccatgctgggaagcacctctggcctcctgtgacccttgctgtggctgggtggactgtgagctgcccacagctccttagtgtcaccagcagtgcatagcgcatcttcaagccctagcgtatactttaaatggcaccagacccagtggagggttaaatggttgaaaactgacatgcagctgggtctggtggctcatgcctacaattccaacacctttggaggctgaagaaagaggatcacttgagtccaggagttcgagaccaatctgggcaacatagtgagagccccatttttataatactttttttttttttttttgagacagagtttcgctcttattgcccaggctggagtgcaatggtgaaatcttggctcactacaacctccgcctcccaggttcaagcgattctcctgcctcagcctcccaagtagctgggattacaggcaggcaccactatgcccagctaatttttttttatttagtagaaactgggcttcaccatgttggtcaggctggtcttgaactcctgtcctcaggtgatccacccgcctcagcctcccaaagtgctgggattacaggcatgagccaccacacccagcctctctataataaaaattttgaaaaagaaaaggaaactgatgtgcaatctgcattcaaggagcttgtattttagaaagagagatagaaaatagatgcaatacaatttagggacaggaagaaaagtggactttagtgggcaaaaggcatggtcagacatcgtggttgtcagtccagaagtgagacattatcttctacgtttagacattcacataattgggacagacatagtcgggatgaggtttgcatttgaattaatcacggaaagagggaaagatgatcaggtggagacaaccagccaggttagagacaccatgccaattcctcatacttcttttttttctttttcaacttctattttagatttagggggtacatgtgcaggtttgttacctgggtgtattgtgtgatttggggtatgaatgatcccatcacgcaggtactgagcatagtagacaacagttagtcattcaactctttccctcctctctccctccccactctaatagtccccagtgtttgccattgccatccttatgtccaacatgttttttattgtgataaaatatacctaatctaacacatttgttattttaaccacttgtaaggacacagttccgggacattaaatacatctacaatgctgactaaccatcagcactctctatatccgttatactttttttttttttttttgagacacagtctcactctgtcgtccaggctggagtgcagtggtgccatctcggctcactgcaagctccgcctcccaggttcaagccattctcctgcctcagcctccccagtagctgggattacaggcgcccgccaccacgcccggctaattttttgtatttttagtagaggtggggtttcaccatgttagccgggatggtctcaatctcctgacctcatgaaccacccgcctcggcctcccaaagtgctgggattacaggcgtgagccaccatgctcggcctatttttttcttaaattacttttgtcacttttcaggttggtatccataatatatctcatgcctgaaagcctgagttcccgcagctggttgatacttacatgactgcccctcagatccaaagacagtgttcctgactgtcactggtgtctaggacagacaagaccaatttaacaccaccaccctttttaaattccccactgatgggaagtttgttcttggattggcaagcttgagtcctgacttcctggaggcttcctctctaatattaaacataccctcaaaaactacccataggatatagggaccattatttttgtacaaataggggcaagcagtgccccagatttctctttgtattttagaaagagagatagagagaaaatagatagaatacagtttggggacaggaagaaaactggactttgatggacagaaggcatggtcaggcatcgtcattgtcagttcaggagtgaaacattatctcctggacttagacattcatgtaattgggacagacagagagaggatgcgcggatgtgcagtcagcagagagtagaagcacataggagacctggggaggaaggtgaaccaggcaatgccaaagagccaagatctccgctggaccagagcccacaatgtttggggaaaacacatccctttaaaagatgataaaaactacagacttgccctccagaaaaatgcttatatcaatctatctcctgaacttggatcagttttagaaaatcacagatccctaaagttttctgtttctacctggaccctcccttctgagtccctaagcctcaaagattacatccggcttgtagctgggcatctttactgctgtccagttataaacctgggaagtgcaatggaccagcagtctcttcccagatgaggccaaaataaataaacaaataataggttaagagcataggctctggaatcagactgcctgatctgcacaccaactctgccgcttgctagatgtaagtcctgagacaagtcacataacttctctgtgcctcagtttcctcatttttcagggtagtgactaccccatagaaatgtggggaggatccatgagttaattcaatgtaaagcgtttagaagagcgtcggccacatagtaggtgctcattgagcattaggcattactaatcaagctggaagccacataagccatcgtgtggtacaggaggaaaacgcaggccactccagagcagcagccaagatgaggcagctctggaaaacaggaagggtgtcccctttggccatgctgcttctgccacattcatgctggtcagctgctcatccttaggagtaggctgtaggtgggagaaccagggggctacttgtagcacccctgatcccactggccaaagcaagagcaaggcagctgccaccactgtcctggctcagatgtcatggtcaactctggagaaaagagtgtgtgctgccctccccagacagaggggggcctgattttgcctgggagtgccctcctgtgatccagcctctccccagtcccatctccccagtcccagtccagcagttagcccaggcctggaggatcttggcaaaaggggaacactcagcctgggtatctaaagcttgaccatcccctgtcctttgaaccccacaggcttgggtgggatgagcagcaagcgaatcaccatcaacaagattctgtccaacgagagccttgtgcaggagaacctgtacttccaggtgagggcagggcaggggtgcagggccagagggcccctgggagggatgaggctcaggcccttacatccttggggcttccgtagagaatggccaagggctcaggagctcctgaccccgagcacagcagcacagggaagagcctccaccagcatccagccagcctccttgctttgctcctgggctaaagtcccagggttaaagaagtgccaaattgtgccgccccctcacttggggaggtaggaccatgggcaactcactaaggctgtctttgggtctctcatctctaaaaaggggataatgggggccagacacagtgtctcatgcctgtaatctcagaactttgggaagccaaggcgggaggattgcttcaggccaggggcttgagaccagcctgggcaacatagtgagacacttgtctctacaaaaaaaataaataaaaactttggccgggcctggtggctcatgcctgtaatcccaactctttgggagactgaggtgggcagatcacctgaggtcaggagttcaaggccaacatgcccaacatgttgaaaccccatctctaccaaaaatacaaaaattagcctggcgtggtggcaggcgcctataatcccagctacttgggaggctgaggcagaagaatcacttgaacccaggaagtggaggttgcagtgaaccgagatcgtgccactgcactccggcgtgggcaacagagtgagactcagtcttaaaaaaaaaattaaaagggaataataatagcatctatattacagggctggagcttaaataggcaatctatgtaatgcgcttagaacagtactaagcacatgtacgcattagcttttgttattaccaaaatcatcagtgttatcctcagctcatggggtggcccgaggggtcactgaggtgctgtgtgggaagcacttagcacagggaccggctctagtgagtgctcaggaaatggcagctgctgttctggcatctgtgaccttcctctgtcctattacgactgctgttcatgaaccccggtggacagggccagggagaggctgcagaggcgcccgctgactgctagaagtctctctggagtgccggggcccctggcctggtgctgcagacagggatggggttgacaaggtggccggtgtgtgtccccctcacctgcatgccctccatcctttctcctacccagcgctgcctagactggaaccgtgacatcctcaagaaggagctgggactgacagagcaggacatcattgacctgcccgctctgttcaagatggacgaggaccaccgtgccagagccttcttcccaaacatggtgaggccctgcagaccccaaccctcgccccatgccagtacagggcagccagatccagaaggacccctcagctgaagctgtccaatggggaggcccaggtcccaatcctggctgagctgctgtgtgacctcacctcaggcacttgccctctctgggcctccatttcctcctaggagtgatatgctcatcctagctgcttcactgggatactgggaacccttttccttaacagataggaaagtgctgtgcaaaagattagaagtcctttatgtacaggagggatttctgttacatagaggggagtcttctataacataaaaagaggttagaacaatacatatgcacacatggacacatatatacacacatgagcacacataaacacatgtgcatgcatggacacatatatacacacacatgcacacagaaacacacatgcacgcatgaacatatatacacacatgcacacacagaaatacacatgcacacataaatgcatacatacccatacgtgtgtgcacattcatacacatgtacatgtacacactgatgcatgcatatatagccacatatacatacatgtacagacatatgtgaatgcttttgcacacacatacatacagaggcagattgcctggttttccacttcagctctgccatttgtgagtgacttagccccactccgtccctatccaatcacagttactacttcacagggttgccgtgagggttccatgagcttaggataggcatgtgtgtactaggtgctcactaaatggaagctgttgccatcgcaatcccccgtcacaggtgaacatgatcgtgctggacaaggacctgggcatccccaagccattcgggccacaggttgaggaggaatgctgcctggagatgcacgtgcgtggcctcctggagcccctgggcctcgaatgcaccttcatcgacgacatttctgcctaccacaaatttctgggggaagtccactgtggcaccaacgtccgcaggaagcccttcaccttcaagtggtggcacatggtgccctgacctgccaggggccctggcgtttgcctccttcgcttagttctccagaccctccctcacacgcccagagccttctgctgacatggactggacagccccgctgggagacctttgggacgtggggtggaatttggggtatctgtgccttgccctccctgagaggggcctcagtgtcctctgaagccatccccagtgagcctcgactctgtccctgctgaaaatagctgggccagtgtctctgtagccctgacataaggaacagaacacaacaaaacacagcaaaccatgtgcccaaactgctccccaaagaattttgagtctctaatctgacactgaatgaggggagaagggaaggagattctgggattgccagttcttccagcagccatgctctgaaaatcaaggtagaatccatggaaagggaccccaggaccccgggaccctagacgtatcttgaactgccatcgtcatttcaaatacatctccctcagggtttccaggtggccacccccaattattcattccttaccaacctctcaaatcctcttggctttctctctgcagtgtggacactgttggctagtcctccccactccctgagggtccagtaagttagcttagaaccttcctggaaacatttcatctgagcaggtttccccacgtgtgggatgctccttttgcctcatctgtctcagggatgcaggctcccccgcatgcatggggatttctccccagaccagcatacttgtgacctgagagttcaatgcgtaaagatgcccctggtcagccatatccatcttctcttgcctggtccttgattctctggccgctccctgaccttcctccttccactgccttgactttcttcctttttattcctggtgccatctgtccaggcagctagacaagaacttgttcgccagcagccagattcaggccttcccaggggcataataagtgaccagcccctcctctccggacatcagatccaacacataaggaccctggcctaccctccagcccaacagccagttctgggtcagctgccaacttaggggtggtttgattatcccattgaaattcaccagtgcctttgccaaagaccctctcatttggacatacccagattcattccctggctccaactgaaaagactcagtttcaatcgttaaaagttcctttagggccagaagaataaatgaattataatcccattttgaagaaccgatttataaccaatgaaaaggttataatgtaatttatattcttggaggaacaagattttcatttgggattatttccttcaaccattcaacaaacatttgttgtatgccactaagcgccaggcacggcgttgggctctgcaaacacagtggttagtagcagtctggacctggtccctactggcatggaacccatcactccccaacatgcaaagcccacatttaaaggccagcctctgccccttcagtgatgcgctctttagaaatgccagtccactatattcagaaatccgcagggcacaaaacttccagcaagtcactgttgtggtgaaatgggcagtgggggtggggggtcttctttaaacaggcccccttcccatctacctagccagtacccatccaatgagtccccagagcctccagaagctgttgtctcctctctggggacagcagctcctgcctttggaggccaaagccccagatctctccagccccagagctgaaaacaccaagtgcctatttgagggtgtctgtctggagacttagagtttgtcatgtgtgtgtgtgtgtttggttaatgtgggtttatgggttttctttcttttttttctttttttttttagtctacattagggggaagtgagcgcctcccatgtgcagacagtgtgtctttatagatttttctaaggctttccccaatgatgtcggtaatttctgatgtttctgaagttcccaggactcacacacccgttcccatctcacttgcccacccagtgtgacaaccctcggtgtggatatacccccgtggactcatggctcttccccacccccactttctataaatgtaggcctagaatacgcttctctgttgcaaaactcagctaagttcctgcttccaccttgatgttgaaatatcttatgtaagagggcaggggatgtcgtgaagatggcaagaagaacacagtttcaaatttctggaaaagagcctgtggtggagatctaaagatgtttagggaagagctcgactaaagaacaatgaaataaatggtccaaggggaagtcatatggctgttggtgtgatgttctttgctgcttcatagacacggcctggagtgaggcaagccacacactgggccctcctggtcctgcagcccttgctgttctgggcacagggtctgggctctcagcataggtatcttgagggttcggaatccccaacacactcagcaactgcatattacatggccaccaccgaaggtcaagaccagtacccgcaataaagtctgactatgttgttctgatggggttccccaggagcagagcctgagatgagcattcaggaacaagtgatttattgagaagtggccggcgcagtggctcatgcctgtaacctcagcactttgggaggccaaggcaggaggatcccttgagcccaagagttccataccagcttaggcaacatagtgagacccccatctctataaaaaatttaaaaaattagctgggcatggtggcacatgcctgtagtcccagctacttggggggaggctgaggcaagaggatcaactgagcctaggacatggagtctgcagggagccacgatcgtcccactgcactacattccaacccacatgatagagcaagaccctgtctcaaaaaaaaaaaaaaaaaaggagcctccggggaaaccaagatggtaactgggggagcaggccaaggaaagggaagaaaccatacaagagtgtgaggtgaagcctcagaccgatccctggagagctctggagcataaatggcacctctgagctgtcctgtctggaggctgagtctttgtccgcctgcaccagtcattggctctggggactctggccctctgaatgggcgagggggcaccaggagctcataggcaaccatctaaagatcacagctgggattaggaacaaagtcacaagcttgtgacaagttctgccgcaaccagaagagggaaccgcaaccacggcagggaatcagccttgtccattgctctgggtgatgtcgtgtccttttaatcaacagctactacacacaagtatttgtgatttgacccatggtatgaaaatccatacaacataaccatgatctaacagggtctttgtgaacaaactcctgaggccctaaaatggagtcacctgattggttgctgagtctagaagctgcttccaagttctttgggagacacctggggcccttctcactccttagtcccatcttgagcttctggaccaatgtcttggtgccactattttaaaggggccactgcaaaatgagaatcactggttcactcactcccaggcttaacccaggggcccaggcctctgaaatcccctttttttggttttgttttgttgtttttttgagacggagtcttgctctgtcaccagactggagagtgcagtagcatgatcttggctcactgccacctccggctccctggttcaagtgattctcctgcctcagcctccagagtagctgggattataggcaagcaccaccatgcccagctaatttttgtatttttagtagaaacggggtttcatcatgttggccaggatggtctcgatctcctgaccttgtgatccacccacctcggcctcccaaaatgctgggattataggcgtgagccagcaccctaccgaaatcctcttttatacccaactaatgtggtccaagccactgcaaggccaatctttcatagatttcctgacccatctagttctgcaattccccaagggatgctgggatgttcaacaagttcatcctggtgatgttttcacatcttggccaatcacccacctcagggtcgctgagtgttaccttgagacttttgaacagcactttccaatagaaatataatgcaaactacataatgtgattttgaattccctagtagccacatttaaaaagtaaaatgcaggtgaaattaattttaataatatattttctttagcccaatctatccaaataattatcatttcaacatgtaatctaaagtgtaaaatttcaatgagatattttacattctcattttttggtagtaagtctttgaaatctaatgtgtattctatacttatatcacacatctattcagactagccacattttaagtgctcaatagctacaagtggctatcatattggaaggtattgttctagaaacttgtctgccaggctgagcgccaattgtggaaataggcacattccttaaacccccagagtccactagtttgactgcaatggttaataaaagtttattattattatattgaaaagagaaatgtaaaatagatacgagccatcactggccttggtatgcagacccttgcccttccagaaagtcttcttgtctgaaccatggctgctgccaagttaccaggacccccctctctctctgcaaggtgattgcctttggccaggtcccctctgcccactgtcaagatgggaacccccaccaggtcctctttttcccctcactcttcctgtggatacagcctggttctacatttaatctaaaatgtgtacttggagtcccaggtgagagcagctcgttatctcagattcctccggcattccagatgggatcagagccacaccttggcatagccaaaaccccacggaagtggttggggggaggtctctcctccgaaacaaaaagcagccaggaatgaatctgcctctccagtgagattcatgtaggatcctcaagcaagtggtatcaggtccaaggggctgatggaaaagttattagcaactaaatataggagtgacatcaaatggcagcatgtaggatcccttctccagctggacatgcagaaaaagaatgctcccagacagaaagcccagctctgcagccttgtctcaagcctggctgatgtgaaagaccttcaccccatccccctggccagctgggctctttttcagccctgatctttgaaaaagcaaaggtcttctctgggtagtctctaagcaaactgctgggttcaggccacgccagcttggcctcaatccctcaccttccacaagcaaaggtctgctttctgacagccctggttatacccaaagatgactaacagtctctgaccagcatgctaaggccccatgcgcaggctactgtgttactgaagagctgaagagatacgttcaatctttaaaaggaatgttttccggccagctacagtgactcatgcctgtaatcccagcactttgggaggccaaggcgggcagatcacctaaggtcaggagttcgagaccagcctggccaatatggtgaaacccagtctctactaaaatacaaaaattagccaggtgtgatggcgagcacctgtaatcccagctactcagtaggctgaggcaggagaatcgcttgagctctggaggcagaggttgtagtgagccgagattgcaccactgcactccagcctgggggacagagcgagactccatcccaaaaaacaaaaaaaaaagggaatattttgttttcctactgatggcaattcctggcacatagttgatgctcagcaaatgtgttttgaataaaagaaggaaacatctgttcagctaggcaatggaagcagaaaagtcagcccaaacatttcttaaacattgattgcattcctaccaggtggaactatatggaatcccatttggaaggtcaaaatggtcaaatagaggcgatttttgttggttcaacctaatgctttgcattcgtcatctcatctaattctcaaaactaagctgtgaggttgttatccccaccttacagatgaggaaactgaagctcagagacaggaagtgacttgctcaagattactcagcaggaaatggcagagctgggattcatacctgggtggtctggctccggagcccacccactgagcgcctgctcttgactacatctcagaaacagctttctagccgggcgccatggctcatgcctataatcccagcactttgggaggccaaggtggacagatcacttgaggtcaggagttcaagaccagcctggccaacatgacaaaaccccgtctctactaaaaatacaaaaattagccaggcgcggtggcacacatctataatcccagctaatagagaggctaaagcaggagaatcacttgaacccaggaggcagaggttgcagtgagccaaggtcatgccactgcactgcagcctgggcaacagaacaagacactgtctcaaaagaaaaaaaaagaaaagaaaaaagaaacagctttctaacccaagtttagcattctttcattcacaaatgttaccttatctttgcaccagtttttagcatgtcaggtgtcctattagaagaatcttatcaacaagatatcccctctacctgcaagcaagatgtctggagattataggattcctacaaacccctctaaggcaataaggcccataatgaaatgacctctacgtagctcagtatgtgctctctctattcctcagctcggagtaagatggcatgtctaaatcgtgaaaagcaaattatattcattcatccatccattcacttttctccattaacatttgccaagtgtctactgtgtgtaaaaccagtgatcccacaatttttcatctaaaccagggcacttctgagatctcagaggagccctgcaaataattccatcagggcaacagaagaatccggaactatgctcggcaaaccagggtgtttgttctccctggaaagccctgtgcatgagacatgatctaatccctcaaggagctgacagctgagtcagggagacagacaggagagcagagaggcacactgatggaataggcacctgataaatacttgctgaatggaggaatgaataaggtacaaaaatctgtgtacacacacacacacctttcctgctgggagaatgaccaaggatggcctggtgttcatttgtcctaagatgaatgactgctgagtgaatgtagaaatgaatgattaggcaaagaggggaggaggggttgccaagctgagtagagacacaaagaggtccaggtgtgtaatatgtctgggaaattgtgattatagtgagtagctaaaatatagattgcagtaatgctggaaacactagggttggtgccctggaaaccgtctgaaggtttgaggtcactgcggtcacatgatcaatcctgtattttaggaagctgacagtaacatatttcttcactgatattaaactcatagggaaaacatttttaagaaatttcctgagggataagcaaaccatggtacagccctgcttttaaatattctgcagcatatatgatgagacggatctatgcatactaacatggaaagacctccaagacacagcacttgacgaaaaaatggcagcttgcagaacatgtatgttatcgtttgtattttctaaaaataaaaatggccgggtacagtgtctcacacctctaatcccagcattttgggaggctgaggcaggcagatcacaaggtcggcagatcacaaggtcagcagttcgagaacagcctggccaacatggtgaaaccccgtctctactaaaaatacaaaaattagccgggtgtggtggcacacacctgtaattccagctactcaggaggctgaggcaggggaatcgcttgaaccaggaggcggaggttgcagtgagccgagattgcaccactgcactccagcctggagacagagcaagactccatctaaaaataaaataaaataaaatagaaaaataacagcaagcaaagccatggatttctgtagaaacatacatatgtaaatacatacaaagaaaaaaatctggaagcaatcccatgaaactgacaatagcaatcacccctgggaaaggaagtgtgactgaggggatttaagctttatctatattgcttgaaatttttacatagtgagaatttaattacatatgtacagtattctaaaataattttttagagctgcctgaaatccttgacattgtatgtatgctgaagtcttcccattctgataagcataatctatttcccctaataaggcacagttatcttttacctctttcctttccccagctgggctctccactaccaatttaagattgatggctccctatagacactaactcatttaattctcctccctgcaaggcgactgtttctttttcaccgtcttacacaataggaaatgaatgcacaaagaggttaaggaacttgctcaagatcacagagcaaatggctgatataacagggtttcagacccctaaaggcctgcacacttaaccattctacctaccagcctccctaagaggtcaaattgcctttaacgttctgcagctctctgacttttgtttccagtcggctggcatctcgccgctacgcatgaatatttacccactattcgtatttgcatttcatttgcatggctgtgtctctgacagaaaacagtgctcaaaagccagattcggctggaaagggcgtttgatcatggcattatacggtgtttgcaaagtgctcacccacacacatccagaggaacaaactaactgctcatttgagagtatgctggtgacggcaggcatctgggaatgaggcagaagttagcagggtgggtgagctccaaatgtatgtgtgtgtgtgctgctatagggccagcagcatgacagtccccagaaggccttggaccacttgctaagtcccagcagctgagctgacttcagctgtgtgaaacgcagccccatctggagtgggggtggctcatgacttttttgctccgggagttccatagaggctgctcttgaaattggagaagcctgtagcctatgattgtccccatcccactcgaagagaatattttgagaagtctaattatatggtggggtttgcatgggatgagggaagagagtttagataaggcctttctaagggcaggttggcaaggtccagtagggagccctgggtagttctgtgaggcagcagcaccctctgtgggtagaccagaatggctgcaaccaccatgttcccacgagccttaggcgcacgcctgcagcccagcccatctacctaacagaagaggctgacctacttgctgggtgacctgcggtgagttgttgacactctctgaggctcagttgcatcaactgtaaatgaagaatagtaatccctactttgtgccgttgctgaaatgattacagagaggacatgtacccaaagtgttctgcataggacctggtacacagtaccaaatgtgtcctccaaatgtggcagttaccatcattagtcaccccaatagccccatgacccttagtatagatgaccaccgagtgccctagcataagggacaaggcttctctgagaaaaatcatagatgggactggggtgggggctagaaaggatctgtgccgctggctggttgacgttttgatttgccaattccgtctattccaattctgggagtccttgacatcggtcatgggaggctctgacaataaatacgttcataaagaattaaaaacagcccaggcgcagatgcacagtcctgtaatcccagcactttgggaggcaggaggattgcttgagcccaggaattcaagaccagtctgggtaacatagggagactccgtctctacaaaaaaaaaaaaaaaaaaacttttttttttttttcagacagagccttgctctgtcgcccaggctggagtgcagtggcacgatctcagctcattgcaacctcagcctcctacgttcaagcaattctcttgcctcagcctcccgagtagctgggattacaggctcccaccaccacacccggctaatttttgtatttttagtagagacgggtttcaccatgttggccaggctggtctcgaactcctgacctcaagtgatccacctgcctcggcctcccaaagtgctgggattacaggcacaagccactgagcccagcctacaaaattctttttaaaagtagctgggcatggtggtgcatgcctgtggtcccagctactagggaggctgaggtgggaggatcacttaagcactggagtgcgaggctgcagtgagccatgatcatgccacagcacttaaacctgggtgacagagcaagactctgtttcaaaaaaaaaaagaattaaaaacaaacttgcagatagcaataagttatatgaagaaaatcaaatagagtcaagtgggtcaagccctcaaattgcccatagtctggggaggcagacatattcatgggtcattgttaaaacaggtgttgcatgcatggatggcatatgcagaggatattttgatagggacaatcaaggagggacttcctaagggaggaaaaagttggagctgaatcttcaatgatgacaagtcaaccacatgaaggaggaggaaaggacactccagatccaagacacggacgtacgcaaaggcttggaggtgtgaaatgaggcggggaatagagcaggctgtattacagggacagaagtaactggaagggcccgcgggggagccggggagccttggagctatggtgggagttgatggttgattggatatggggtggggagaagaatcaagatgacatcgagtttctggcttggatatccggtagatggtggtgctaataagacaagtataaactcctcaggtgagatgtaccgtttgggataggttgggtttaaaggaccattgggacgcccagatggagatgctcaggagacagccagggagacggaaaggacgaagcccactggccaaaggcaaataaaatcctaaattttggctgggcgcagtggctcatgcctgtaatctcagcactttgggagtccgaggcgggtggatcacgaggtcaggagatcgagactgtcctggctaatacagtgaaaccccatctctactaaacaaaatacaaaaaattagccgtgcgtggtgacaggtgcctgtagtcccagctactcgggaggctgaggcaggagaatggcgtgaacccgggaggaagagcttgcagtgagccgagatcgtgccactgctctccagactgggcaacagagtgaggctccatctcaaaagaaaaaaaaaatcctaaattttagatgagaaggccccagagctccaccacagcaatctgttgctgtgggtttttcccagaggcaaatgaatctcccaggcaacatctgatatttcctcctaaatccaaccctccttcaccctctggctggcagaaatcatccaggttgccctaaattacaagacaccagactacaattgattgtacaaatgacagttgatacaacataatgcttttttattttgttattttcatttttttgagacaggttcttgctctgttgcccaggctggagttgcagtggtgtgatcacagctcactgcagcctcgacctcctgcactcaagcaatcctcccacttcagcctcccaagtagctggtactacaggtttgcaccaccatgcttggcggattttaaatttttttgtagagacagggtctcaccatgttgcccaggctggtctcgaactcctgggctcaagggatcgatcctcccacttcagcctcccaaagttctgggattacaggtatgagccactttgcccagctggttttaattttcaattctggacatgatttccagctcttaggggagaaagacctcctaaagcaaaacgctcacctaaggctgctcagttttcctgctgtccaaagactgagagagtctggaaaacaggagcagcttttccaacccaaaagtgtggttatgaggactaaatgagactgtttatgtaaacacctttgcaagtgataaagttcagtataaacatagtgtctagcagactgtctggtgaaaagcaatatgtcactctctagacgaatggaaataaaccaaaaaaacctagggtcttatcatgaggacatctttggaaaatatgtcaggatcaggccatgaaaatttctaagtccttctgcagctgtgactttctggcatcccaaagtccagggcggaggtacagccgcccaggaatttattcctccataactttgagctccccaaatccccacgaagcccaggaatgatgtgactgcagggcatgtgggcccattggcaccaacagcccctccataaatcaaggtctcacttatgctggcctcagactgctttttccaaggtgacctgggcaaactgaaagggtagttgcttatctaggggtggcatctgcctttgagatgaaagaaccctgaaaatgctaagaggaccaattctctagaaatacattcctttcaggaagagctttcttcagctcagacgacaattcagttaggagttagagacagagcggcagtcttcccatatctcagccagtttgggtgacccaagaggccccatggggcagaccagaggggccctgttccagtcctgggtcagcaccagtgaaagtcaaggtgacctcagcattgttaccagttatccacaagacagccacgtgaatcacagaatcttaaatcagagggcccaacaccctaatggttcaggcaaggaaactataggtcaaagatggggaggggcttatccaaggtcacatggccttgaagagaatattccaggttagacctagaggttcaggcctcactacacaccccctttaatgaggccacactggcggtatagcggggttccagtcaaggactccagaaacagcccatccagccaattgacctggccatctcaatgtctccagtagcatccacatcagctgtgagagtggaaaccaaagactatagaaaggcgcccttcacatgtccaaaacaagcagacagaaaggggaaaaaaaaatcactcctacgaaaccccgggacctgcaaggttaacaatctacacaaacgcgtggagtgactgaagaggcaggtgccttggaggctccaggccactcctgcccaaggtaagtcccaagagtgaggccagctctgagcagatccatggagggggctggaaaaagaagctgagatgtctaaaatggaaactcagtaaaaaacaaaaccaaaaaactttcttcacagaactgctgtggggattaagtgggataatggaccataatgtttggcacagagtagaaatggtttcttatattaaatggctaacaaagccaccaaggactgggtgtccttctctgggcacaccctctcgtacagaacagagctcacagtgtctagctgtctgctcacttgccgtctccaccactagagagtaaattcaatgagcagtgaccacctggcttgctcattccctgcagcatcccagcacttggtgcctgccacatagtagccactccattcgtatttatgaatgaatgaatgaacgaacaaaagaatggcacctttgccagccacccttgaaatcacctcagctcattcaccaactgcccagtttgtttgggactctcagtgcagaaacctgggcagcctcgggcaagctgcacggtatgcgacagaaagggctgactcaagccagtaagcgtcagagatgaataataagactgacaaattcttagggaggctaggtgtggtggctcacgcctgtaatcccagcactttgggaagttggagcaggatgattgcttgagcccagcctgggcaacatagccagactccatctctacaaataattttttaaaaaaattatccgggtggccgggcgcggtggctcatgcctgtaattccagtactttgggaggccgaggtgggtggctcacgaggtcaggagttcaagaccagcctggccaagatggtgaaaccccatctctactaaaaacacaaaaaaattagccgggcatgatggcggacgcctataatcccagctactcgggaggctgaggcagggaattgcttgaacccgggaggcggaggttgcagtcagccgagatcgcgccactgcactccagcctgggagacagagcgatactccatctcaaaaaaaagaaaaaaaaaaaaactacccgggtatggtggctcacacgcctgtagtcccagctactctggaggtgggaggatcgcttgagcctgggaagtcgaggctgcagtgagccaagactgcacaccggcctgggcaacagagtgagaccctgtctgaaaaaaaaaaaaaaaattggccgggcgcagtggctcatgcctgtaattccagcactttgggaggccaaggtgggcggatcacgaggtcaggagttcaagaccagtctggccaagatgatgaaaccccgtctctactaaaaatacaaaaaattagccgggtgtgatggtgtgcgcctgtaatcccagctactcgggaggctgaggcaggagaatcgcgtgaacccgggaggcggaggttgcagtgagccaagatcgcgccattgcactccagcccgggaaacagtgcgagactccatctcaaacaaacaaacaaaaattccaggaataaagaggttgaaatcggggcagggacccggataggatggctccgccccatctaagtcttagccccaccccctgaaagtcgccctgcctctcagactcctcccctttctgagaaggtcacgggggaagccaaatgggcatgcgccgctactgcgctattgcgcacgctcgctgtgcttgccccgccttccctccgcccacccgggaaaccggaagccgcctcccacttggttgctcgtacgcggctagtgggtcctcagtggatgtaggctgggcgccgcgatgttcgacgggacaccggcggagagcgacctcggggttaaggggtggggctgacgtcaggagccaagatggcggcggtggtcgccctctccttgaggcgccggttgccggccacaacccttggcggagcctgcctgcaggtgagtcctggagcctcagagagggaaaagtcaggaaagccacagagactgcctggagctgatggggctgcggagagactgaggaagcatagggcaaggcctcagggagatggaggacctcctccccctggtgcagtgctttggtttggcttcgagcatccctgtcaagttatctttctgcgcctcgcagcagcttgtgagttagggcacgggcaattttttacagctaagggtgcgggggggggggacgttcagaaaggggacttgaattgctcaaggtcacatggcaagcgaatgactgctggaaccagaatttgaatccagacattggagttccaagccctttttctgccaccaaactatcgcctctgtagaaaagggagacctgcggggtgtgaaggatgggaattgggaagcgaggtaattcctcaagggtgcgaggttgaggaccgggatgggtgaggaaaggacatgtgaattgttggggacagggcaggggaagggagagatggagggaaatgcacccagccccctacctcgaaggatcccggaggtgggtggtgggggttgcaggaaagactgggttccttaaagcagtgtcaccacagtttcactagtatcctctcagtgtttctgactctaaaggtcatataataatacggacctcatagagttgacatggaatgacaggtagagggcttggcgctgttcttgtttattactatgccgtgtgcagtaacagattttcccacgccccttgtatggccaagaaacaacacatttctgacctgccttctaagtgggaacatttagaaggggaagggaaattgcttttgtatacataagggactaaggatttgcaaatcctttctaagtctgttcctcttctgggattctcaacaacccctttaaggtgggcaagcaagaatccttaccctcctttttggagctttgaaaacttgaggcccccagaaagaaaatttttggcttgctcaaaatatcacattcccaagaagcagacctgaggcagttttttaacatggtaccagaaaaactccttagcatagatcttgggacatggttggtgtccaagaaattttagttcctcttcctctcttgcacttaaatgaggacatctttcatcttaagtgcctgctatggctgcataacacagtacatattgcccatgttccaatcctggttctatccagcatgctgtgtgtgaacttggatccactctgtctgcatcagcctttctgaaaaggggagatagaggaagaagacagcctaccagagcctcaagctgacatcctctcagtattaaattgatgattgataatgagcttgtttacctgttccttttatagttgctgagcaaacaattaaattgtgagagccccactaacgagagagttccaagcccctcttctaagaatgcattgtagaaaaggctaatttcataggtcatttttgtaattccaggcaaggtctttgcagggcctcctgagggcaacagaaaatagaagagccccaaggcctccccttccttgtgggaatgtacatgtatacccacaaaagccacctcaaaagaattcagtaatgagcttggtgtgttacctgtgggtaacattcaggttcaggttctgaattctttttatgcttatagtctgaccactgaaccacaattctgcctgtaagtatttgactgtagtatattaactattgtttgtgttgccttatttcttcatctggactatgaactcctttaggacaagaactacctacttaaaagtgtgtatcttgccaggtgcagtggctcatgcctgtaattccagcactttgggaggccaaggtgggtggatcacctgaggtcaggagttcaagaccagcccggccaacatggtgaaaccccgtctctactaaaaaaataaaaaaaaaattagctgggcgtggtggtgggcgcctataatcctagctacacaggaggctgaggcaggagaattgcttgaacctgggaggtggagggtgcagtgagctgaaatcgcaccattgcactccatcctgggcgacaagagcgaaactcagtctcaaaaaaaaaaaaaaaatttaaaaaatgtgcatcttgttccttaggctggcagggctaggatacctatttacaaatcagaataatacaaagactgataaggttgccaatcttgtagagcaaaaatttttttctgggctatgctagaaacttgaccccccctcccccgggttatcttatgaggcagatattaatactacccaccctttacaaaggaagaaatagaatccgaaaagctaataatttgcagaagaatacacagcttgtaagtgatagagcttggatttcaagcatcaccaatcacacttttcagcaagcctgcaccttgtattttactcaggcttatcttcatacagtcctttttgctttcttcctctctatttccccaccttcttctctggcctccaaatctttatccactccatccaactccaagcctgcaccctaaggacactttactggaggaacaacaaccagccttcagcaccattcagaattcacccttctcagttcagttgttgcttaccttgcttaaattataaactatgaaattcatactatccaagatttcctaggaatgtactttctgccttgaatactcattagtctttagattaacgtaaaaatgctttcaaggggccctctttccttttggatttgtagtataaattgctgggcaggtaacaaggggaaaaaaatcatatagtctcattgtatgattagagcaacaacttcttttgttccttggatctcattgtgaaatggaattatctttttgcactgttgcgttttatgtttgcgttttcaccactggttataatggctaaaaggttggatttttgaatcaagtgacctgtgttgctatatgatcctatcctcgtcttttaactgggaacaacaaaacatttttcatagagatgttataaagattagagattatttggcaccgtgtgtgacagattataaaggttcgatgaatgaaatctggcaaatttttagatatatgtattcaacgaattttttggtggaacacagataacataatcctgagaattaactctttgtacagacctcaagatgagcaaagctctatcactttcagaaccatgaccactctggtgattttgatttcagaatcttctttcattctggtaaaccccctttgccccaccaaatattgtatgaaatacatttttttttttttttgagacagagtcacgctcacgttgttgcccaggatggagtgcagtggcggaatcttggctcaccgtaccctccgcctcccggatttcaagcaattctcctgcctcggcctcccaagtagctgagattacaggtgcccgccatcgtgcctgtctaatttttttgtatttttagtagagacggggtttcaccgtgttggccaggctgatctcgaactcctgacctcaggtaatccacctgcctcggcctcccaaagtactgggattacaggcatgagccaccacgcctggcctataaaatacatttttgacacaaaacaaatttaaattagttgtactgaaaaaaaaaaaatgatgacattttggggcactccaaaactgatgttgggatatgtcgacttagatattcagtgtagtacatcctggcattgctcttatttcacatcattcatatgataagactttttaaaaatttaaattagctctaatacaaacttagtctcttttggaaagataatacgtgatcaattatccgtgtagagtggatatgaaacagatatttaaatgttataaagaaatgttgaagggaaaacctcattgcaggtaaccacagtcatcccacaggccttgtggttctgatacccagcttgatagagcctaatgcctgttgcccactgacaatactaaatcaggctttagaactagggggttatgcctggcacagtggctcacacctgtatgtaatccagcactttgggaggctgaggcaggtggatcacgacatcaggagttcaagaccatcctggctaaaacggtgaaaccccatccctactaaaaatacaaaaaagttagccgggcgtgtgacacgcgcctgtaatcccagctacttgggaggctgaggcaggagaattgcttgaacccaggaggcagagagatctcgccactccactccagcctgggtgacagagtgagactgtctcacaaaaaaaaaaaaaaaaaaaaaaaaaaaaaagaactaggggattatgctccagtcccagattctgtttaaagcccggttaggggccaggcgcggttgctcacacctgtaatcccaacactttggaacgctgaggcaggtggatcacttgaggccaggagtttgagcccagcctggccaaatggcaaaaccttgtctgtactaaaaatacaaaaattagctggactttatggcacatgcctgtaatcccagctacccgggtggctgagacaggagaattgcatgagcctgaggggtggaggttgcagcgatccaagatcgcgccactgcactccagcctgagcaacagaatgagactctccaaaaaagaaaaaaaaaagtccaagttagggccagacacaatggctcacacctgtaatcccaacactttgggaggctgagatgggaggattgcttaagcccagaaattccataccagcttagccaacatggcaagaccctgtctctacaaaaattagctggacatgatggtgtgcacctatagtcccagctacttgggaggctgagtcaggatgatcgcctgagcccaggagttaaaggctgcagtgagccatgatctccagcctgggcaataaagctagaccatgtgtctataaaaataaaaaataaaggccgggcaaggtggcctgtacctataatcccagcactttgggaggccaaggcaggcggatcacctgaggtcaggagttcaagaccagcctggccaacatggtgaaaccccgtctctactaaaaatataaaaattagctcggcgtggtggcaggcacctgtagtcccagctactcaggaggctgaggcagaagaatcacttgaagtcgggaggtggaggttgcagtgagccgagatcgcgccattgtactccagcctgggggacaagagtgagaccccatctcaaaataaataaataaataaatattttaaaaaataaatgaaaaataaaagtgtccaaattagaagtaaaaacttgaagtagccccattttttaaaaggcatattgtcccacttaccctactatctgcctcaggcacagcagccacccactctggaaaatagttttgtcagttgcttaaaaaaaactaaacttgtagctaccatacagcccaacaattacacacctgggtgtttatcctgagaaatgaagatgtaacgttcacacagaaatttgtccacaaatgttcatctcagctttattcatgtcaccaaaaattagaacacccccaatgtccctcagtagttacatggttaagcaaattgtggtacatgataccttggagtgctactcagctataacaagaaaaaagctattgctgtacacagcaacttggatgaatctccggagaattcggctgaataaaaaaagccaattccaaaaggctacataccagatgattatattgatataacattcttgaaatgaccgaatttgagaagtagagaacagattagtgattgctagggcttacggagtacaggggaggtagggtgggaggaagtggacagggctataaaagggcaatgttagtgatcctgtgcttatgggaatgtcccctatcttgactagcactgtcagtattctggttgtgctggtgtgctacagtttgcaagatgttcctgttggggagactgggtaaagagtatgtgggccctggcatggtggctcatgcctatatcccaactcttcgggagggccaggcagaggatcacttggggccaggagttcaagaccagcctaggcaacacagtgagacccctatctctacaaaaataaatgtaaaaaaactaactgggcatggtggcgcatgcctgtagtcctagctactggggaagctgagatgggaggatcgcttgagtccagaaggttgaggctgcagtgagctgtgatcatgccactgcacaatcagtgacagagcaaaactctctctcttttttttttttttttagcttgagtttcactttgtcacccagggtggtatacagtggcacagtcttagctcactgcaacctttacctcccaagttcaagccattctcctgcctcagcctccctagtagctgggattacaggcacacgccaccacaccctgctaattcgtttttttgtatttttagtagggacggggtttcaccatgttggctgggctggtcttgaatccctgatctcaggtgatttcccaacctcagcctcccaaagtgctgggattacaggtgagaagagtatgtggagtctcagtattattttcttctttttgttttgttttgtttctttgaaacagcgtctcactctgtcacccaggctggagtgcagtggcgcaatcttggctcactgcaatctccgtctcccagggtcaagcgattctcctgcctctgcctcccgagtagctgggattacagacatgtgccaccacaccgggctaatttttgtatctttagtagagacggagtttcaccatgttggccaggctggtcttgaactcctgacctcaagtgattcgtctgtcttggcctcccaaagtactgggatacaggtgtgagccactgcacctggcctcagtattattttctataaatgcatatgaatctataattattaaaaaataaaaaggttggccaggcacggtggctcacgcctgtaatcctagcagtttgggaggccaaggcaggcagatcacctgaggttgggagtttgagactaccctgaccaacatagacaaaccacatctctactaaaaatacaaaattagccgggcctggtagcacatgcctgtaatcccagctactcgggagactgaggcaggagaattgcttgaaccggggaggcggaggttgtggtgagccaagattgcaccattgcactccagcctgggcaacaagagcaaaactcagtctcaaagataaataaataaataaatagtttaattttttaaaaaagcatttaactatggttatatgcagtaacatatgaatctcagaagcattatgttgagtgaaagaagctagacatgagactacgtaccgtatgatgccatttatatgaattctgtaaaaggcagactcgtgatgatagctgatcagttgctaagggtaggaaaaggggacttatgtttgccatcaagggcacaaaagacctttttggatggaaatactctgttgtaattgtggtaggattacattgctttgtcaaaactcattatacccttaaaattagtgaattttattataatgaattataccttattaaatctcacagaaaaaagaccaaaaaaaaaatgggacattaagcaagcaaagtccactggagttgataccttcaggaatctttcctctcacttcctcccaaataccacaaggtggcattagatgttcatgtcagtttacaaaatggggttcccggtgaaaaacatttgtagaaatggctttccttttgttgatgattttagccagcttggtgataaggtaaaacatagctttcatcttaactttcattttcttcatatattttcttcttttctactgttagctgatgtttgtattttcagcttcagttaatacgggacactttaccaagaaataatgttactggtagacggtcttgaccacaagtcgtcaaggtttttagcatgttgaacaaaaaattggacaaaacacacaagcaaagcaacagaagacgaaagcatagatttattgaaatgaaagtacactccatagagtaggagtgggattgagcaagtggttcaagagccccagctgcacagtcttctgggattaaagtaccctgtacgggtttcctattagttacaccctatgcaaatgaagacttggcccgagacgaatcagaggctgtagtgaagactccctgtctctaaaccctgttctcctgcctcagtaataaacaccactgcatctttttgtaattagtcaattaaccttccgagtttttacttttctatatcagtttattttaaaaattagcagtcctggagtatagtcttttctttctttttttcttttttattttgtatttttgaaaaagagtctcactctgttgcccaggctagagtgcagtggcatgatcttggctcactgcagcctcaacctctcgggcccaagcagtcctcccacttctgcctcctgagacgcacactacgacacccagctaatttttttattttttgtagagatggggttttgccatgtttcccagactgctctcaaactcatgggctcaagcaattctctcacttctgcctcccaaagtgctgagactgcaggcatgagccaccaccctcagaccacaccccacactccttccccttaattctggtttgtcaagcctccacttagatgacatgtgaggaagccttctctgactcttcactcattgaagtctctgctgtattcatccagagctccctgtactttcccaacagtatcgctctttatattcatcgtgaatgtttaatttaactcttgttcactacaaagtaagttctgtgaagatgaaggtttttgtgtattaagtgctgtgtcactagcccctaataccatgtctgatatattagcatatgataggtgcttaatacttgttggatattgaatgcctgccttttctaagaagattatgtgtcagtaatgtgtgagtttatatccagcgttacatctgttgtgccagcaaaatggaattatcttgtatttctaatttttttttcctttttgtgaactttaaaaaatttcaggcctcccgaggagcccagacagctgcagccacagctccccgtatcaagaaatttgccatctatcgatgggacccagacaaggctggagacaaacctcatatgcagacttatgaagttgaccttaataagtgagtatctctgtgaaagccagctattgaaggagagttcttgatttgatttagggacatgcttttcacatccttggaaggcttaaaaatctgagatcatccgatggctctgtttttaaaacaagaatgagcttgggccgggcacggtggctcacgcctataatcccagcactttgggaggctcaggcgggcagatcatctgaggttgggagttcaagaccaatgtggccaacatggtgaaactcccctctctactaaaaatacagaaattagctgggtatagtggctcatgcctgtaatcccagccactcaggaggctggggcacaaaaattgcttgaacccaggaggcagaggttgcagtgagctgagatcatgccattgcactccagcctgggcaacagagtgagactctgtctccaaaaaaaaaaaaaaaatgaggttgttacctgattcagaagaataataccaaaataattcccaaatgaaagtatgacaaatttctagaaatactggtataattaactttatgcacagtatttaaagtcatttaatatattaccatttttttaatgctgaatgtattgattatatcttatacatctggacctgtgttttctataataataacagaaccgccagaaacttgccttgaatggacaaggtagggatgtggttaaaatgttaaaaattggactggcgtgttagttttctatttctgtcagagcaaattaccacaaacttagtgacttaaaacaacctaaatgtattatcttatagttctgtaggtcaaaagactggtatagtctcatcagactaaaatcaaggtgtcagcaggctgcattcctttctggagcctagaggaaaatattttttgctcatttgcgctattggtggaatgcagttccttgtggttgtgagcccgaggtctctgtcattctgctgactgtaagctgagggctgttccaagcttccagaggctgccgcactccttggctcttggcctcttcttccatcgtcaaaagcagcagcagcaggttgagttcttcttcacatcacatctctcaaaaccactctttttccaacatctttcacttttaaggaactccacagttagccaaagaaaagaaagaatctagcaagttagtctctagcctcctgctgctccactccacgcccccatataaccagaactgttctctgatctgttttatgtgtaagtgaataagtgttttatttgtttcaaacaaaagcttctgtggcaccaaaaaaaagtttgaataccacgaatactctaaatgcttactttgactttctgtggtgacaagtaagtgctgttaatgaggtagcattaattgatatataaccttcttaaatagacaaaattttcaaatactcagcaaccaaaagtccctagcaaaattcaaaggaatagaaattgcacagaccacagttttggaccgaaatacaataaaactaaactcatattaaaaatataaacaggccgggcgcggtggctcatgactataatcccagcactttgggaagccgaggcaggtggatcactcggggtcaggcattcaagactagcctggccaacatggtgaaaccccatctctactaaaatataaaaataagctgggcgttgtggcaggtgcctgtgatcccagctatttgggaggctgaggcatgagaatcacttgaacctgggaggcggaggttgcagtgagccgagatcgtgccactgcactccagcctgggtgacagagcaagactctgtctcaaaaaaaaaaaaaaaaaaaaaaaaactcataaaacaaaaaaccctactgcttagaaactaaaaaaaagtacacttctaactatttgatcaggaacacgtaaaaaatattgccagatacttagaaaataaagacgttgcaaatcaaaacttagagaatgtcagagaatgtggctaaaactggaagagttaaattcctttttttttgagtcagggtctcgctgtcacccaggttacagtgcaatggcatgctcacggttcactgtagcctcaacctcccaggctcaagcaatccacctgcctcatcctcctgagtaactgggactataggcacatgccaccacacccagctaagttttgtattttttgtagaaattgagtttcactatgttgcccagcctggtctcaaactcctgggctcaagcaatccacccattttagcttcccaaagtcctaggattacaggcatgagccacagcacccagcccataacgattttttagtgataaaaaatttaaagaatctttgggtttacttccagttttgtcacagtagctctcatcagactaaccctcctacaaataacaatgatcaactccggaaaaaaatataagaaacaactgcctgaacagtagagaaggaccacgagtgggcagacattggaggggagttgatacttggaagaatgaaatggcattggacaaattaccattttactcttacatgattttgctgaggacaagtccaagttggtatgggaagtaacgggactaacagttggatggaaaaccacaatccgactgggtgcattggctcatgcctgtaatcccagcactttgggaggccaaagcaggccgacatggtgaaaccccatctctactaaaaatataaaaattagccaggcatggtggcacatgcctgtaatcccagccacttgggaggctaatgggggagaatcacttgaacatgggaggcggaggttgcagtgagccaagatcacaccactgcactccagcctgggcaacagagtgagactctgtctcaaaaaaaaaagaaaaaaaaatcttagcttgaataacgagaagacacattttgggccttccacaaccactaggaaatgagggggaaagcctagaaagaagagaaacacagaggaggagcactaaatgctgttcatgaactctgcccacatcttgcgtgcagccatattaattgcctgtgtaaaattttaaaatccacacttttcagaaaaacataatgcaatccagattctctacagcatattaatttttcttttttttcttttttatttttttattttgagtctgagtttcactctgtcacctggactggagtacagtggtgcgatcttggctcactgcaacctccgcctcccgggttcaagcgattcccttgcctcagcctcctgagtagctgggactacaggcgcgcgtcacacaccgtctaatttttgtagtagagttggggtttcgccatgttggccaggctggtcttgatctcctggcctcaggtgatccacccacctcagcctcccaaagtgctgtgattacaggcatgagccaccgcgcccagtggaatttaaagaatttttaaatttcctcatagataaaggaaattatgctcataatgaaataggaaatttcagtggagaagtagaaactattgaaaagccaaatggaaaatctagtactgaaaaatataatatttgaaaaggaaaatttaccggatggccttaacagcagattggaaatggcaataagaagaatcagcaaacttaaaaatattaatagaaattatatagttttttgttgttgtttgtttgtttgtttcttgagacggagtcttgctctgtcatccaggctggagtgcagtggcgcaatcttggctcactgcaacctctgccttccaggctcaagcgattctcccacctcagcctcctgagtagctgggattacagacgtgcaccaccacgcccagctaatttgttgtatttttagtaaagacaaggtttcgccatgttggcaggctggtcttaaactcctgacctcaagtgattcacccgcctcggcctcccaaagtgctgggattccagacgtgagccaccatgcccggccgaaattatctgttcttaagaaaaagaaagatttttgaaaagggaaagcgctcctgtgatctatggaacagcatcaaaaggtctagggcaggcatggtggctcatgtctgtaatcccagcactttgggaagctgaggcaaaaggatcacttgaggccaagagtccaagaccagcttgggcaacctgtgagaccttgtctctactaaaaaaattttttctttgaaaaattagccaggcgtggtggcacatacctgtagtcctagctacttgggatgctgaagcaggaagacagcttgagcttaggaacttgaggctgctatgagctataattgtgccactgtactccaacctgggcagcagagtaagaccatgcatgggtgagtggatggatggatgtaacacacatgtaattggacttccagaaaaaatggagagaaagaaaaggcaaaataaatatctatttgaagaactcatggccaagaatttcctgagcccatgaaagacataattcacatatccaagaagcttagtgaaccccaactaggtaaataaaaataaaactatgccctgttccatgaagtcaagttgctgacgaccaaaaataggagaaaatcttgaaagcagctggagaaaaacaacatgttacatacaaggaaaccaggtgaaaaattgctgacttctcatcagaaactagaggccaagagacagtgaaataccatctttaaagtactaaaagaaaaattgtcagcctggaattccacgttcagaaaaaaagattcttcaagatgattatgaaataaaaacattttcaggtaaacagaaaagaaaagaattcatggccagaagaccagtactacatgaaatgctataggaagttagtcaggctgaggaaaaataataccaggtggaaacttggctcttagaaaaggaatgaagagcgctggacatagtagatataaaaggatttttcctcttaattttgttaaaattaatatgactgtttaaagcaaagttattatattatattctgtaatatataactcacatagatgtaaggcatatgataactatagcgtaggggctgggaacagcaggtaaatagacctataataatgtagcaggattcttgcattacataaagttgcacaatagtaactctaaacaggtataaagagttaaagatgtaaattatgtaaagtataattctagagtaactttttttcttcttctgagacagggcctcactctgtcatccaggctggaaggcagtagcacaatcatggctcactaaaccctcccaggctcaaccaagcaatcctccctccctgagacctcctaggctcaagcaatcctcccacctcagcctcccatgtccctgggactacaggcatgtaccactatgcctggccaattttttttttttttttttttttgtagagacagggtctcactatgttgcccacactggtctcctgggctcaagcagtcctcctgcatcagccttccaaagtgctaggattacaggtgtgagccaccatgcccagccaagagtaattatttttttaaatgcaaagagatatagctaaaaagccaatatataaattaaaattgatttctaaaaatatttacttagtctaaaaatattacttagaataagaaaagaagaagagaacagcagcaaaatgatggaacaaatagtaaaatgatagacctaaatccggccacgtcaataactgtattgaatgtaaaaactattaaatactcccagttaaaaagccaacagtgtcagaatagatttttttaaaaaaagcaaaacccaaccatatgctgttttaagtgcaagaaaaagcgcaagaaaaaataaagaaatacatttgaaaatcaatgtgattcaccatattaacagaataaagggggaaaacccatttgattgctttaatatatgcagaaaagcatttggcaagattcaacactcattcatgatttttaaaaatgataatgggttaaataattttcacagtgtgtatattttaacagaataaataaataaaactataaggaatttgaattaaaaggaatagtcctaattttacttaaataataactgctaataggaaaagaagggaacttcatcagccagatgaagactgtgaaaatcacagctaatagcatactttattgtgagatattgaacactttccccataagatcaggaataaggaaggttgtccactctgtatttgagttcaacattgtactgaaggttctagccagtccatgaaaggcaagtaaaagaagtagaaggcatatgtaagcttggaaaggaagaaattaaactaactgtagtcacaggtaacatgattgtttacatagaaaatttcagggagtctacaaaactaaaagaataagtaaatttagcaaggctgcaggatgtaaggtcaatatgcaaaatactatttgtgtgtgtgtgtatttcaatggctacagataattctatttatgctaacatcagccattcaaaattttactggaggcttagccagggaaattgggtgagaaaaagaaagaaaaggaaattggaaaagaagaagtaaaactgtctctcatagataacataatcttttacacaaaaccttgggcaggctcagtggcttgtgcttataatcccagcattttggaaggctgaagcaggagaattttttttttttgagacagagttttcgctcttgttgcccaggctggagtgcaatggcacaatcttggctcaccgcaacctccgcctcccggattcaagcaattctcctgtctcagcttcccaagtagctgggattacaggcgcctgccactacgcccagctaattcttttgtatttttggtggagatggggtttctgcgtgttggtcaggctggtctcgaactcctgacctcaggtgatctgcccacctcggcctcccaaagtgctgggattgcaggtgtgagccactgtgcctggcctgaagcaggagaattgcttgagcctgggagttggagaccagcctgggcaacaaaatgagacccccatctctacaaaaaagcaaacaaaaaattagccaggctgggtgcgatggctcacgcctgtaatcccaacattctgagaggccaaagcaggcagatgacttgagtccaggagttcaagaccaccctggacaacatggcaaaaccctgtctctactaaaaatacaaaaattagccaggcatggtagcacacacctgtaatcccagcttcttggaaggctaaggcacaagaattgcttgaacctaggtggcagaggttgcagtgagccaagatcacgccactgcactccagcctgggcaacagagcaagactgtgtctcaaaaaatttgccaggtgtggtggcacactcctgtagtccgagctacttgggagggtggggtgggaggatcacttgaacccaggaggtcgaggctgcagtgagccatgattccatgccctacactccagcctgggcaacagagggagacgctgtctcaaaaaaaaaaaagaaaagaaaatataagacattgccccctaggaactattagaactaatgaacaaattcagcaaggttggaggacacaaaactggtatacagaaatcaaatgtagtttagttttttattatgcataatttgtccatgtttatttcaacctatgtctgtcagtcttcattttatattgtaccatgttttaattatagttctatttccttctaatccgactctgaaaccctactttgtagctatgtatacacacacaaaaaatagctatattctttcattttcacaacagcataattctttttctgaaaatactggcgtgtagcagatattagcagataaatgtatttttctaggctaggcatggtggctcacacttgtaatactagcactttctttgtgaggccaaggcaggaggattgcttgaggccaggagttttgagaccagcctgggcaacaatagcaagacttagtctctacagaaaaaatgtgtgtgtgtgtgtgtatacatatatatttatatatgtatttatatttatatattcatatttatataaatatttatatttatatattcatatttatataaatatttatatttatatattcatatttatataaatatttatatttatatatgtaaaaccctgcttacctagaaaaaagcctgtaagtactgttaaaaaaacaaaaattggatttctatacactagcaatgaacaatcctaaaatgaaatttaaaaactattttccatataacagcatcaaaaaagaaattcttaggaacaaattatatgggcaataagacaaaaccccatctctacaaaaaaagttagctgggcttgatgaccttcctgtgcctatagtcccagctacttggaggctgaggtgggagaatcacttgagcctgggaggtcaaacctgcagtgagctgtgatcacaacactgcactccatccagcctgggcgacagagtgagatcctgtctcaaaaatcaaataagtaaaagacttatatgctgaaaaactgtaaaacattgttgaaagaaatttaagaagacataaataaatggaaagacatgccctgtttgtgggttggaagacttaatgttgttaaggaggcagtggtctccaaattgatttccagattcattgcaatccccatcaaaatcccacctgccttttctgcagaagttgacaagttgattctaaaaatcttatagaaatgcaagggacccagaatatcaaacaattttggtatctatgtaaaatctgagaaaatttatgttgtactctttaatgagccctacctattaggaaatttagcatgaaacagcttaaagagaggactttgactttttaatatttttctctgtcccagtatgatctgcaggattactttttacctttgatttgaatttatttatttatttatctatttatttatttatttttttgagacagtctcgctctgtctcccaggctggagtgcagtggtgcggtctcggctcactgcaacctccgcctctggggttcaagcaattttcctgcctcagcctcccaagtaattgggactacaggcacgtgcaaccacacccagctaattttttgtatttttagtagagacggtttcaccacgttagccaggatggtctcaatctcctgacctcatgatccacccgccaaggcctcccaaagtgcctcccaaagtgctgggattacaggcgtgagccacccacctggccaatttgaaatttttataggctgcaaatattagcctttgtaatgtaaaaaaaacaaagatgttgttgtcatttaaaatatgctaggacaagaacaggcagatcattagaataaaaatgtagcaacaaaacagactcaattttatctaagttcccagtattaaatatgggagaaaggtattacaaataagaagcaaaagaggatttagtcagtgatttgggacaactgatacagtttttgcagttttaggggagtaacttaaaattttttttaagtagaaaaaaatgtaaagtatttatcagacctcaggaagggcagtggtctgtttaggcttaaaagtgatagataatgttataaaagaaagaatagccacctttattaatgtaaacatttaactcatgtatgtttaaaattctgttaccaaaattagaagtcaaatagcacattactattggcagtgagggaggaagcagaaatggcaacagatataatatataagagcctcagatcatgaaaaagaatttccaagaccctggtaaacagaggcaaagaatgtggacagactgagtctctagaatgagtcctctggaacagagctttgtgcgggcaggtggtattcgtctcttttattctctgctacatccccagcatctagaacagaacctggcagagtaaatgttcaataaataattgggaaataaagaaaaattagtaaatttatgacaaacattcaacctatgtagtattcaaaagtctcgatttaaaacactgaaaacaataacacttctccagtatcagaatagcaaaggtttttaaagcttccaattcccagtgttagcagaggtccagcagaaaggacgtctacatagtgctgatacaaatacagataatgggccagacgcagtcgctcacacctgtaatcccagcatttgggaaggctgaggcaggtggatcacttgaggtcaggagtttgagaccagcctggccaacatgggaaaacctatctctactaaaaatacaaaaatttgccgggtgtggtggcatgcacctgtaatcccagctactcgggaggctgaggcaggagaatcgcttgaacccggaaggtagaggttgcagtgagccgagatcgcaccattgcctcacacccataatcccaacactttgagaatccaaggcaggaggatcacttgagtccaggagttagagaccagcctgggcaacatggcgaaatcccacctctacaaaaaaatacaaaaattaagctggatgtggtggcacatacctgtagtcccagctactggggggctgaggcaggaggatctcttgaggctgggatgcggaggttacagatctgagatcgtgccactgcactccagcctgggtaacagagcaagaccccgtctcaagaaaaaaaagaaaaaaaatgaaatacagatagtactaaaggaaatgacgtatttttaagtatatttttaatctcatgcatagaaaattagtgagtggaatgggggcagggtggcaaccagaaaatagatttgtggagcacttactgtatgccaggtactatgaaaaattacatatttttatgtaattttcacagtaaccctgtggtgtaaatattaactctacagataaactgaggttcagagagtaatttccgtagaatcacagtttctgcatgatgattattatagttaaactatgatttatatgtcagatgctgctgtaaagatctcgtgtgtattaactcacctccagcaatcctgtgggatgcaggtgctgctctctgcactcagtggattaaatgcctaggcagaaattaaatcatttgcctgcaagctggtaagtggctcagccatggtgcagaccagtctcttggctgccaggccggcactccaggtcccacgcccagggatgctccgcttagtaccatgtcactgcccttgtatgttctaggaggctcacagtgatttgactgggggactgtgagtgattgggtgtcttttattctctgtactatgtcttctcttatggttatgtattattaattactatttaaaactattgtctacatcctaaaaatcaaactaaaatttgaaataaattatttggaaaaactttgcagggagcttcagaagtaaaaaacaaaaactcggccactgtatggaagttgtgtcatacttgtctactactactttagctttccatttcctagaaatgtgtttgcactgtgatcatcaaaatagaactgtgcagtacttaaaatgtaagaatctgcaaaaacaaaactacagaacaaattccgaaggtgacctgagaagaccaaatggataagctaatacatccaggtgtctccgattatattatgataaagtgtagggaggttgaacgttacataaataccactggatatttttctttgttagatgtggccccatggtattggatgctttaatcaagattaagaatgaagttgactctactttgaccttccgaagatcatgcagagaaggtgagcatttcattcctgttgggctccagatacttgtggtcttccaaagaggcttgggctggccaaagctgatagagacatctggaaaacagctgcagctctctgctgggtgaacttgctgtgcaacctaattccttttcttgggtaaatgcatccaaaattctaaccatggtgcaagttctggtttctgagtttactttccttcaggagcattctatcctgtggttactgcatctggcggtccctgtgagctgctccacgcttcaaggcctagctaggacctgctggctggcaccttccatgctgctgagctcttttattaagggagcagtggagagtttctgtctggcacttatgcttgtccagcaggggagatgtgtgagtctccctcagctcccagcatgacatgtccttggtagctgtgttctggattggctggtacagtgtctccctcagcatgtggttacttgtgctgctggtgccacatgagcccatttgaggcagtgtgcagactaacattttctacatgaatagcaatgtattcattttctgtattagaaaaatataattactgccgggtgcggtggctcacacctgtaatcccagcactttgggaggccgaggcgggtggatcagctggcgtcaggagttcgagatcaacctggccaacatggtgaaaccttgtctctactaaaaatacaaaaattagccgggcgtgatagcggacgcctgtaatcctggctactcgggaggctgaggcaggaacccgggaggtggagtttgcagtgagccaagatcacgccactgcactccagcctgggcaatagagcgagacagtctcaaaaaaaaaaaaaagaaaaatataattactaatgatggtataatagggatataagtggttttttaatgtgaatttaagcaaaacaagttaaagaaaacccaagagatactttaaagaaagttgattcaggtggttctcaggtatagcaaaaattgcacagggtgcagtgaagaccgactggcctgatgtccgtggagccagactgtgtgcccggctctgttctgtgcactggacatgaggtagatgactgtgcttattatctaccttcaatttaaaggtgaggcccagagagggtaatggacttccacaaggacacatagagagtgacttgagagccgggagtcagccaaagctgtcagactccagactccagatctgctctctcaggcactgacttggcttggaacacctgggataaaacaaaagcagagagtagcttgattctgtgaggacactgagcttttttctaagaaaaccttaaaaaaaaaggaaaagccagtattgataccggcccatggctttttatctgttcagctgtacatttcaagcatttcaagtcttttaagacatctgttttgattcagctaatcttatttagcgttgcaaatgctgatggatattatgatagttcggctgagtcctgctgttcagggaacattctgcggcagttaaacagcagccttccccattaagtcctggcaacacaggaaaggtagatgcttttcagtaacctttccctgtaggactctttcagaaccaagaacataaggtgtgacccatctggactaaaaaaaataaagcagaattgtatcaattgctactcctttttattcccatcttgtttttcttattttttttttaattcccatcttgtaagagaattcccagggagcctttttgagagaaagttcattggatttatttttttaatttttatgccatttcttgtaaaagcaaactgctctagttggatgccaggtatacataaatgtattgataatatccagtctcttggggaactctaggagtatttgcttaagacacatctttgggttcccttacactctttctaagatttacaggagaaggagagtcttactgtcttttctagtcttatgaaagtgataaccgactgggcgcagtggctcacgcctgtgatcccagtactttgggaggtctaggtggtaggctagcttgaggctaggagtttaagaccagcctgggaaacatagactccctttccattaaaaaaaaaaaaaaaaaaggtgaggccaggcattcagaggccgaggcgggcagatcacaaggtcagagttcgagaccagcctgaccaacgtggtaaaaccccgtctctactaaaaatacaaaaattagccaggtgtggtggcgggcgtctataatcccagctactcaggaggctgaggcaggagaatcacttgaacccgggaggcagaggttgcagtaagccgagatcgtgccactgcactccagcctgggcgacagagcaagactccatctaaaaaaaaaaaaagatgataaccagtgcaactttctcaagcaatcaggtttctctgacctaatgatcttcaaaaaacagcttcagaggactggcactagaggtttagagtacataatcatttttaaattccaaaacacccaggaaatttccatatacaggaagtaggtccaggctaagaaaattctcatgtcggggtcctgggtcagcacgttttttgtttagtttgctttgctttgcctcagtttcatattagttcattcttctcctctttggaaagtccatgctgagtcagcttttgtggatttcatagccccagggtactatgctgcgtattttatgaagacaatagaagaagccttacctctgtcaagtgtagtggctcaggcctgtaatcccaacacagtgggaggcaaaggcagaaggattacttgaggccgtgagttagagaccagcctgggcaatatagtgagacacctgctctacaaaaaacaattatttttttcttttttttgagatggaatcttgctctgtcacccaggctggagtgcagtggcgcgatctctgctcactgcaaccttctcctcctcagttcaaatgattctcccgcctcaccctcctgagtagctgggattacaggcacccaccacgacttatatttttagtagagacagggggttaccatgttggccaaactggtctcgaactcctgacctcaagtgatctgcccacctcagcctcccaaagtgctgggattccaggtgtgagccacttcacccaacctacaaagaatttttttgaattcgccgcacatggcggcatgtgcctgtagtcccaactactcaggaggctgtggtgggaggatcgcttgagcccagaagtttgaggctaaagtgagctacagtgagctatgactccaccactgtacttcagcctgggtgacacagcaagactcagccaagaaaaaaaaagaagaagagctatctcttaataatctgtatccaggtcacttcaaccttaagatgaccaagacaatgttgatttactttacttttgggtattgtgtctgttagatttgtgttcaaataacagtggctttaaaaaatctaggtttccaggcgtgagccaccacacccacccctactcaggaggctgaggcaggagaatcacttgaactggggaggcggaggttgcagtgagccaagatcgcggcattgcactccagcctgggcaacaagagcaaaactccttctcaaagaaaaaaaaaaaaaataggcttgacgggtgtgtggtggcccagacctgtaatcccagtgcttcgggaggccaaggcaggcagattacttgagcccagcagttcaagcccagcctgggcaacataacaaaaccctgtctctgcaagtctcgtctctacaaaaaataccagaaaattagctgggtgtggtgggctacttctgtagtcccagctacttaggaggctgaggtgggaggatcacttgagctcaggcattgaggactgcagtgagctgtgattgcaccactgcactccagcctgggtgacagagtgagaccctttctttaaaaaaaaaaaaaaaaaaaaaaaaaaaaacaggctgatttttcttcaaaacacgtgacacatggagctagaactgctgtggaaactccatggtgccagcagcgcccaggcctctggcctcctccagtgccatacttggcatgtggcttctaacctcaaggttgccacatggtcatagagtagtttttggaactcaagccattagaaccacattcgaggcaggaagaaggaaggaagggagaaaagccaacaggcacctctgtcagaggaatgttgcatgtcagtgctgcccctgatggcacagcaaggaggatccagaagaaagtatttggggcaggactgattccggatatgggtgaggatgtgttaaatgtgtgtctctttcaggcatctgtggctcttgtgcaatgaacatcaatggaggcaacactctagcttgcacccgaaggattgacaccaacctcaataaggtctcaaaaatctaccctcttccacacatgtatgtgataaaggatcttgttcccgtgagtttctgcatctctctggttttgtttttatttgcatggggggcagtgctatgtgtgttacgctattagtttttcagggcaggatttgtttgagtatttaaggctcctcttctagtcagatagtaaatagatgggactgtttcctatattatggcaggaggaggaccacagtgtcactgagagattaggaaaatctccagatctgagacagtgtggccagagtttaattaaagaatttgaatggcagaagataaacgcctagaaaatcctccagcagctcatttggtgaggtttgtttgagaataatggggcacagaattttagaattggaacattcccagaaatgaataatttggccataactacaaagaaatcatgtggaaaatgccagttgggaaagcaacagctgtttatgagtcccactttaatttctacctccctatatttgaacacctttgctgacgtggtgttttcaagggcagaaaggactgtgggattggcaggtttcccaagtaggtgagggagaggtttcctaaccatgcttaacattgtgaccatttttccttttgtaatctttgcatatattcatgacaaaggaaaagagtctggcttctgcctggcatagagtggacgagtagtcagtgtccaagaaatggggtaaataaagctgaggtgatgatggaatctgatccttttcttcttcttcttcttcttcttcctcttaaccacaggatttgagcaacttctatgcacagtacaaatccattgagccttatttgaagaagaaggatgaatctcaggaaggcaagcagcagtatctgcagtccatagaagagcgtgagaaactggtcattagtccctatttattgtttcaatctgaagaatttattgcaaagatgattgccaggagtgtggcttggcagggaacataagctgatgcaagccatttagtgtattctggagaggaactggcacaagggtggggcactcatcctcttagggccgggtgagtagtgtgaacccgtgaatggcccagagtggaccaaggagctagagccctgtgccccgcctgcaggggcgggtggttgctgtgtggctactccatctttttcaaaagaaaccagtatgtaaattgcctgggctttaaaaagtgaccactaagtcagaactgttccctcactgggggcaaaatgaaacacatatgctggccagttgtaactaccaccgtcctgctttacaaatgggagtgaaatgttaatggcaaaacagagtcatcgatattctttcctgacaccatacttctggtgatctgtggggtgggattattcctggcctgctcactctctgggagttgccattcctgtgtacaagctgtaaaatcttaaagcggaggcatcattatcaagttttcagtctttcttcttctacactacttctactcctctgcgaagaagtcttctctgatttgcatactccctgcatacttgtggacgtgaggtaggaaggggaccaaatggagacagagccccacctgcaggtctgcacagggccaagggcaatggctgtgtcttcttcctttctggatccctaggccctggcgcatgttattttatccataaatattagttatgtaaatactgtaaaaatatatataaattttttaaaaggccagatgcagtggtgcattctgatagtcccagctactcaggaggctgaggtaggaggatcacctgagcccaggagtttgagagtctgagagtttgaggccagcccgggcaacatagcccaggttttgtctctaaaacatatacatatatgtgaatatatgaaaagtatcagttgtatgaatgaataaattaattctaccttttgagacttggtaaatatttagcatcctctcctgttgcccataaaacgttaagaaaggggagtccggccaggtgcagtggctcatctgtaatcccagcacttagggaggccgaggtgggcggatcacttgaggtcagttgttcgagaccagcctggccaacgtgataaaaccccatctttactgaaaatacaaaaattagctgagtgtggtggctcacacctataatcccagctactcaggaggccaaggcaggagaatctcttgaacccgggaggtggaggtttcagtgagccaaggttgtgccactgtacttcagcctgggcaacagagcaagactccgtctcaaagaaaaaaagaaaagagaaaaaggggagtcctagtaagtgtgcccagtctgtcaccatcaagatagtgagggtcagcacagtggcctgcaagtcagagtaagcctgggatgagacttcagagctgctcttctcagactgcagctctgctcctcagtttctacctcccagagtcttgtgcatcccagagtccaggctgaaccgggccctctggcccagcgagtcctttgcattcctaggcaaggctggtgcgtagctagtgaacatctccctgatgtggtattattagggattgaagagttcccctgagcatgtttggttttctagatacaagttgagtattccttatcctaaatgcttgggtttcagtgtttggggtttcatatgttttcagattttggaatatttgccttacacttactagttgagcaccccaaatccgaaatctgaaatccatgctccagtgaacatttcctttgagcagcatattggtgctcaaaaagtttcagattttggaacattttggatttcagattttcagatttgggatgcccaacctgtaatagaaatttactcatttactcatttacataccaaacatttaacattttttggcttccttaaattagtatgctgaacttaataaataattggaaaatgtggagaaatttatgtatgtatttatttttaattgggcagcccccaaaccaaaataggttcagagaggctccatcattttttaaataagctataattttcagcctggggaacatagggcgaccctgtctctacaaaaactttaaaacttagccaggcatggtggtatgcacctatagtcccagctactcaggaggctgagatgggaggattgcttgagcacaagagttccaggctgcagtgaactgtgattgtgccactgcactccagccaggggcacacagcaagaccctgtctcaaaaaaaaaaaaaaaaagaatttataattccaccaccaaaacataatctctgttaatatttatagtttcctttgttttttgtttattacattatatttttatgtagctgggatcaaaatgtaaatatgcttttatatcctgcttttttcacttatgttattgtgagcattttcttcatattcttaaaattgttcataagcattaacttacactttgctttctactgcttcagatgtatgcaccatgcgccataaaaccatttcactgttgctggacaatgaaattgtttccaattttttactgttagaaataaggctagatgaacatctttatccttcaagttctgcccaaaacattctaatttcttattacagatttttctaggagtgggttaaagaatatgactattcttaaggctcttaatcctgtgaccttatgccttctagaccagtggggccagttgacactcccaccagctgtctggacataacatagatttggttgaagactcatggttcaatcacaaccatcagttctgtctcatctgttctcaactgtcacttcaggtgtcagtgggcccctttcattttgctgtttttaatccatttctgttgtttccaaactcagaaagtccggtttgtgtttgggacttgttgggcagattgacccagtgtggcaggtgtgaaagtgcaggaagccagagccagctgccggggccacatcctggttctgctgcctatagtggcacgtccctgggcacatggcctaactcactctcctcgccttggttccttacctgtaagtggaacttgctggagtcacctcacaggattactgtgatgatcagttaaggaaagcgtgtaaggcgcagggcctccgtcaggattggcagtggcagtcactggggatgatgttgatgttcccagtgaaaacctgagggcccttctgctgagcccagggcagaagcagctacagactcttgctgcttcagcccctaggcttttgaatctctcccgtcttgacctcattccaggaagctggaatttatgggagttgtttttgtgttcttgttttctatttcttttttagacaagtgagaggttcttgtttattaaagggaaagtgcactatacgtggatttaagaaccctgggcagatgtttacatttcacttgcaagatctttattaatctgctaaatatctgcaaatcaccccttggattttgctaagaaaattcacatgcaagtaggcactttgttcatgcactgaccccaaaggtaacatttaatcagctgaagacatagcagagtctctcccgtcacaagctcctgcctctcttttctccccatacaggacgggctctacgagtgcattctctgtgcctgctgtagcaccagctgccccagctactggtggaacggagacaaatatctggggcctgcagttcttatgcaggtgaggtgctccttaattgctttaagagaaattgaaactcaagcatccagaagtccaagaggacaatagattgctgtaagccagccattctgaggggcctggtttccttcattgccatccagtccaaacagggtaattggttgcattgtattcacttgctttcggtaaatctggggccttgtctgcaaattgcctttgtttcagtgcagtgagggtcaccccaaaggggtgcaaaccatgccttgcagatgtttaaaatgtatttccgtttgcctggtggtcagaggctccccctctccctctcataggatttgtaacataagacttgtagcgagcaagcaggggagaaagcagtgtctttgaagggcagctgcccagctatgagattggaagctgtttcccagctaatgaaagcctggatttaggggttgcttagaaagaaaatagtattgatgttcactgcaaagaaagtcactgtctttgttcccagaaagcttgtgcttttttagatacgtgcttttcacagactctaggcaactcaaaaaccaacttctctttctcattttcccacaaaaagagaagttacaggtttgtgtgaccacatgagcaatattgattcccagccatgtgaagattggataatgaagtacactcatacttgtcacttttgccagctgctccgagttggggatgtagaggtcctctaagtaacactgctagagcaggcctatggtcatgtgattaactcgtttcagcctgctgatctcaggctgctgagagcgctgtgtaagttcaaagaatcattaagtgggacaaatactatctgtagacaggtctgttaaatcattcctttactcagagacagcaagtccagcatgggtaggtgccatgaagacagataagagttatatgatacagtccctgccttcaccaaattataagctgggtaggaagctattgagcaatgtgaaataattaggagatgatacccagtgtgtataattaagcacccgggtaccaggtgcagtatggatcaaaggtttgcagggaccattaatcaagtgaagctacaagtgttgggaacctttccttgaaagatggacaagaattaaagagtatggagatgaggcatctaagctgagtgaattccctttcctctgcactcccagagctttgagttgagccagggtgccgctctggcctgttgattggcagctcagctaatcatccctggttttccaggcctatcgctggatgattgactccagagatgacttcacagaggagcgcctggccaagctgcaggacccattctctctataccgctgccacaccatcatgaactgcacaaggacctgtcctaaggtacgtggggctggtgaccctcagctctgcctcagagctgacacgccagaagtagcatgtgctcacaaagaggtgattggcagagagcaaccctagtcatttgagaaggaaagggaccagcatatgcctgtcctttcagtgtgagcctaggggctagtttggctcttagttgcaaggagtagactgactcgggccacctcaggagcaggctttatttgtaggctacacagggacattgtgggagttaaggatgcacaggaacccatgagcaggtacctgcgttcaaccttcccaggaaacagaaagcgaaagccgttggaacgtgggcagctgtgaggacttcatttcttctccatctttctcgcgatgtcagctgctaatctgctctgctctctagcagcctgttctttccttcggctctgtggaggttttctctgactcaaagctctggctttcgttcctcttcctgctcgcatttgctgctgcttttggctcactctggcctggattttgcctcccagcacacttccagcttcagccacccgcctgcctcccagcacttctcagcacagtttcctgagagggtgtcgcattggcccagctcaccttctcatgcctgcacatcagaggccacagctggctacagaccggctgccctttggccaggttctgtctcagtctgttttgtggtactatcacagaatttcagactgggtaattttataaagaagtttatttgacgcacagctctagaggctggcgccagcatctaacaagaaccttcgtgctgtattaccccatggcaaaaggcagaagggcaagagaaagggagcccaagctcagccttttttttttttggagacagagtttcgctcttgttgcccaggctggagtgcaatggcacgatcgatctcagctcaccacaacctccgcctcccaggttcaagtgattctcctgcattcgcctcccgagtagctgggattacaggcaggcaccactcatgcctggctaattttgtatttttagtagagatagggtttctctatgttggtcaggctggtctcgaactcccgacctcaggtgatccacccaccttggcctcccaaagtgctgggattacaggcgtgagccaccgcgaccggcccctctcatctgttttttttaaaagacagggtctcactgtgttgcccaggctggggtgcagtggcgcaatcatagctcactgcagcctggaactgctggccttaagtgatcctcctacctcctgagtagctgggactacaggcacacaccaccacacctgactaatccaaactcatccttttatcaggaacttactcctatgataatggcaatccatttgtgagggcagagccttcataatctaatcacttcttaaaggtcccacctctcaatactgttgcattggggattaggttttcaacacatgagcttttggggacacattcaaaccatagcaggtgtcagccctggtccagtcagccttgcccagtgggcagggaagggctagggctgtgtggttcagaacacggctgccctccgagcaaagactgtgggtgatttcactcaaaagttgcagtgagtcagtgggcggcaaggtggaaaactgtagggtggccagttagccgtaaaaaaagatcacactgtgtgtttgaaaacatgaaatccaagctgtagaattcacttattttttgcctggaaaccctctgtgtttccagtggcctcgctgggggagcccacaggcttcagctccctattgcctgggcttccatctgggtcctgtccccaggactgtggtttaccatgattgtgcctgtgaatagctactgacctctgaggcaagttatgctataaaagtgcttggaacagtgcctggcacatagtaagcacccaataaatgtcaccttatgttattttttaaaaaaacatgagtactgggcttgtttgagacagagatagcatcttcagtggtggggcctggctgtgtgtttcttcagaagctctgcgagtgactctaaggtgcattcctggtcacaaacctgtgcatggaggggatgggtgcagcagacaactgagacagccaagaacaggttctctgtgccttgccctcccttctgtaaaacagggctggaagttgggactgagacatagacataggccgatcatgaaactggaagggacttgaaaaccatcaagtttaatccccttatacagatggggaaattgagccccaggtggggaggggagtgactcgccccagatcactgtcaggtcagtgggaaggtaggactagagttaggccgtctgcctccccatccagtgctctttcttcctgcatggattgggtatgtaccaaccttctaagtctaaacacccttactgaccctgtggggaccggaaatacacaggtagatccagattcagaaggatatacagtgaaaattctccctcccactccacccagccacctccctagaagtcagattcttgtgtgaacttcagaggtgttttatgctgcacacaaatgcatatgtgtcctcttctgtctttcttatatcacatttatctgtattttttcacccactatattttggagattatcccatgttggtatatgaagagtgtctttttgaccagcctggacaacatagtgagatcccatctctacaaacaaaattttttttaattagccaggtgtggtggcacgcacctgtagtttcagttacttgagaggctgaggccggaggatcacttgagccaggtgttccaggccacagtgaactatgatcacacttcagcctggatgacagagcaagaccctgtcaaaaaaatatatattttttctttctcttcttctctcaagatctcttttctttctttccttttcttctttctttccacaacacttttttaggggggtagacttatccttctaaaatgaggggaaccttcactaacgtcagatgagtacttgtctcattttaccaagtacttgcttggtaaaagcaagtacttggtaaagtacttcctactttctacttcaatgaagctggcattcagtgggtttaattattgtgcctcctgcaaagcagatgttaacagctgtaggggcaaactgcagctaataccaatggtattggccagttgaaatcatcatggttttacaaagggttaatagagagggtagtttcttccacatacttttgagagctggtatatgctgatttctgctgctgcctatttaataatgatgatgtaaaagatttagagatgtctggctgattttgacattggcctgtagtcctagaagagacactaccctgagtgtctttgagcagtcagagagtgcacctctgccctgggcctgtttacctgttagagtgagccacacaagaaggaattcaacgtggcagagctcttgccagagggagctgaccatcttcaaatgttaaaaaaggtagacagaagagagcccttagcccaacccctatggttttgagggacttgatttgcattcaccttgcttggacactgaaccagctgaggaaggagtttcacccaagattgtgggttttccctttcagtttcagttatcatttgttattgattcttttctcttttttcaagggtctgaatccagggaaagctattgcagagatcaagaaaatgatggcaacctataaggagaagaaagcttcagtttaactgtttccatgctaaacatgatttataaccagctcagagctgaacataatttatatctaatttgagttcctttaaagatcttggttttccatgaatacagcatgtataataaaaattttaagaaataaatgttattctactttattaacaaaaaaaaaagaacctgttcctttacttgccgcaggggaatgtgaaggtgccaggagtccttgtccttggagagatggacagggcttcagagctgagcgggggtgggggtaccctagctggaaggaggtgatgagccgtggaactgacatcagcagggcctgcagcttgttcccagctttgccactcaccagctagacaaccttggacaagttccttcacctctttgctgctccattcgcccatctgtaagatgggatccataattgtgcctacttcattcatctggtatgagaatgcctggcacttattctgaacactcagttagtgttagtgttctgtatcttcccagtttctatagttttcagtaccagaattactgaaaaccaaatcttggtaagtctttggatacgtcggtgaggccaggtttgagattcctccagcacagagcaatgaccctggtcagttgtgaatccagttagttccacaaatgacctcgtggggcctctcactgcaaacatcaactccacagcactgctgccttggctggcatgctcactgcacagccgggcgtggtggctcacgcctgtaatcccagcactttgggaggctgaggcgggaggatcatttgaggtgaggagttcaagaccagcctggccaacgtggtgaaaccccgtctctactaaaaatacaaaaattagctgggcagtgggtgtgcgtgcctgtaatcccagctacttgggaggctgaggcaggagaatcacttgagcctgggaggtggaggttgcggtgaccgagatcacaccgctgcactccagtgtgagcaacagagtgagaccctgtctccacaaaacaaaaaagcaatgcaaaaaaggagaaagggggaaagtaaaagtggaagctcctccaaactcatcccgttgatagcttagacatttccttccacactctacgttattacagttatgcagcatatataaaactttctcccttcaaaagtaaggtaccatagagccaggagctgtggcgtgtgcccctaatccagctactcaggaggctggggtgggagcatcacgtgagcccaagaggtcggggctatggtttgccatgattgcgcctgtgaatagttactgcgctccagcctgggcaacatagtgagaccccattcctttaaaaaaaaaaaaaaaaaaagcctggaacagtggcttctagcacttttgggaagccaaggtgggaggattgcttgaggccaggacttcaagatcaacctggccaacatagtgagaccctgtctcttttttttcttaacataccaaaaaagattttaaaaataaaggggtatcctatagtctgccagcagctattttttttttttttttgagacggagtcccaaaaaaaaaactgcactccgcctcccgggttcacgccattctcctgcctcagcctcccaagtagctgggcctacaggcgcccgccactatgcctggctaatttttttgtatttttagtagagacggggtttcaccgtgttagccaggatggtcttgatctcctgaactcgtcatccgcccgtctcagcctcccaaagtgctgggattacaggtgtgagccactgcgcccggcctctatttttacctcacaatgtagaagggatttcagtgctaataaagacctacctttttgttgttgttgttttgttgtgtgttttttttttttttttttttttgagacagagtctcgctctgtcgtccaggctggagtgtggtggcgcgatctcggctcactgcaggctccgcctcctgggttcacgtcattctcctgcctcagcctccagagcagctgggactacaggggcccgccaccacgcccggctaattttttgtatttttagtagagatagggtttcaccgtgttagccaggatggtctcgatctcctgacctcgtgatccgcccgcctcggcctcccaaagtgctgggattacaggcatgagccaccgtgcccagccaagacctcccttatctgtgtgtgtgtgtatgtaaaaatttttggaactcctgcttaagagcactgtggcatgggtgtacccttatttaaccattcccctactaaggcacattcgggtggtccctattcaccttttcatccaaggctgcttttttaagtcgtagctggaaacctctggatcatccggaaaacaaaggtttcatgcatcctgaggcaagcagctgagaaaacgtgtgactcaccgagaatgagccttaatgagcattttctggcttaaagggctgattcaacaagcatctgtctcaggcattatggaaggtgaggtgctggggacaaggatgaacaagatttgttgcctgcctgccacctaggagccaaggtcacaaaggaaaaaggaacaaacatcagaaatttcaagaacagggccgtgtgcccctccctacagcatcttggaattcttgactatctcagtgagacacacagtacatggccctgcggcgctgaagcctaagattgtggagtgcactggcttcttgaaagacagtggaacttgaactgcgggccatgtctgtggatagcttctgttccccagctcagacctaatggctttctatcagcctggggaaaggtcacattccttggattcatggataatttgacttggcttctaatctccagatctgtagggaaagatgggtttttctcatgaatgactttttttttttttttttttttttggagtctcgctctgtcaccaggctggagtgcagtggtgcaatcttggctcactgcaacttccgcctcccaagttcaagcgattctcctgcctcagcctcccaactagctggggttacaggcgttacgcagctaatttttgtatttttagtagagacagggtttcaccatgtttgttgagcatactgatctctaactcaagcgatccacctgcctcgacctcccaaagtgctgggattacaggtgtgggcaagcacaccctgcttctcatgaacaacttaatgctttgtaaagatgggtccgcaacaactgataagaggcagggtgtagcttaggagtcgccacttcagatcagcgtcatcagaggctgggttgactctgatggtcactctccgcagttgaactccaagttaaattggtatatgttatcaactgatagtttaatttactgcttaatctttcattgaattggagacaaatgttctattgcaacagtcacaaaggcttttccagtaaaactgcagacctgtgtggggaacagtattttgtcctgtatgctacttctgtgcccagtgtgccttcatttacaagataatacttccagcctggccctgtggctcacgcctataatcctagcgctttgggaggtgggaggattgcttgagcccaggagttagaggctgccgtgaactaggatcgtgcctctgcactccagcctggatcacagagccagaacctgtctctaaagaaattaaaaataaaaatagaatttcgtaggactgaagccagccatcccttcttacctagctctggacatgttgaacatctgtgactctattttcctatctgtaaaatgggaattaacagcattcccctctcagaattatggttgaagtctaaaagtaaatgtgaaagcatcttgcctgcagtagagtaaatgctccataaactcaagtgaacggatttgtcttgagtacctactatgtgaaaggccctcgagtgaatgctgggaggctgcaagagtaattccttcccaaccctgagttgacagctggcatgtttctgacatgactggccagagctagaggcctccctgttgggaggatggtttttccgtgcaaggctaatattgcttatttctcatctctcccgtcacactgctcaggtcagggagggactcccattggtcaaattctcttcaggccccttcccttcctggcaccaggataactaccatacaaagtgctgaaactcggccaggcacagtggctcactcctgtaatcccactttgggagaccaaggtggatctctgaagcacaggagttcgagaccagcctgggtaacatggcaaaccccatctctacaaaaaaaaaaaacagaaaaattagctgggtgtggtagtgctcacctgtagtcccaggtacacagaaggctgaggtgggaggatcacttgagccgaggtgggaggatcacttgagcccaggaggtcgaggctgcagtgagctgagatcatgccactgtgctccaacctgggcagcagagagagaccctgtctcaaaacaaacaaacaaaaaaaacaaaaacaaaaactgaaaccccactttactgtgtgtctagacagccataatcctaccaacagggtttgttactaggtgaaaaaaatcctcttttgttgcaaaaatctagtgaaactagagaagtcgaaaagtaaagcaatgctctggaataaactcgcccaaattagtgatttctcaagctttttgccactgggaccaggcctattacgccctctccgtgggttcccaagagagccacagcctagaagggaagctgttcagtcggttctcacccacgtgggactggaaatttcagacacggttatccgggaagacagcctgggccacagacctcctcgatgaccacacaccgagagccacttccccaaaggtaaccccaagcagatggcaaggcctcccacatgctctgtggtttggaaggaagcttcctctggcctcctccctcattaaggagaagggacgagctgcaggtgcggctccttcccagctggctcagggaatagagcccctttaaggccaggcagccttagcaataaaaagaatgaagggggcacccttgcaaggcagtcccccatgcagtccccaagccctctgcttttatttatttatttatttatttatttatttatttatttattttagagggagtctcagtctttcacccagactggagtacctctgcttttatgaagccgctaatccagtgccaggatctaaagcaagcagctggcttctaccaagttcctgccatctcatttcatcctctccatgccttccattttgtaggtgaggggaaggagagccttagagaaggaaagtgacattttaaagctcacacagctagaaagcaactcatgcatccatgtctttctgatgccagaacccagccccttgccactgtaccatactgcctcttgccaaggccacctgggctagccatttccaaacccagccttcctgctgccctggaggctgggttcctgccagaaattgagctaagccctgggggaggacatgggagttctgaaaagttaagcagcctgcctcccctggaagtgtcaccggaagatgaaagaactcttgtcacctgacccaaggaagccagtcccatggcccaggtggtcaacaggaatgacccgcaactggttggctcgggcagcctgccccagctgagtaaatggctccactggcacccagctgctcaggccaaaaccctggggagcatcttgaattccacacattcctgcacccccacatcctatccaccagcaagtcctgccaacgtgtgttcctgtaccaaatgttcactgggatcttgctatgaatcaggtgctgctttccctcctggggtctatcccctacccacaccctcaccaccatcacagctgtgtctccttccagccccttccacaatagggatcgttggagttttcctttccttgactagggctacttcccagtagacagcagtctccgcagggacaggggcatctctgttttgttcactctcacgttcctggctcccacagtggtgctggcactccataaattcatactggacaaatgaccagtgatcctgcccacgtctatccttggccctaacgtgaaccttcccttgtttgccctaggatctcacagatccactctcccctttggagctcctctgtccagaggtcctggagacagggaacactatgcctgtgccggtcactatggggtagcaggataaatgctgcacgcaggtaagacatctctggtgcctttcaggggtcttcatgaatccccccagtgcaggtgtgtctgcaggtcacgctgtgaggcttctctttctctggcatttcaaggcctccagtgcatcatggcagactctccctgggtctctgtgggcccacatctgaccctgtgaatctctgggcaggtgtgtcttccttctttgcattcatcaagcagcgccaggcactgtctcaagtgcttgatacgcattttcttttttttttttttttgagacagagtttcgctctttttgcccatgctggagtgcaatggcatgatcccggctcacagcaacctccgcctcctgggttcaagcgattctcctggcttagtctccgagtagctgggattacaggcatgcgccaccacgcccagttgacaagcattttcttgtgtgatcctcgcagcagttctctgtgaagcaggcattgctatcctacaggttgggaaaagagggccagagaggatcagtgacttgctcacggtcgcgcggcctggaagacatggagagctggaccagcacgcacagtccctaaccactgggacgtgctggcgggggctacctccgtgaggtgtgtgtctccggtcgccccgcccccggtgtgtgcggaggagcaggcggggactacaagtcccggcagccccggcgcgggcgctgcgagggccgcagagggccgggcggggcttgcggcgcgcacggagggactgcggcagtgtcggagccgcgccgagcctggtggcccaggtgccccgcccgcgtcagccctgctccagccccgcgctagcccagcgcccctcgccccgggccgtccggaccgcgcccccgcccagggccttgcgcacgccggggcccaggccgagggccgcagcgccggggccggcgatgagcgcgaggagccggcatgagcgcaggtgagtgcggagtccgggtcggccccgagcccggcgcggtccccggcccgccagttgtcgtcaccccttggagggagaggggaggcgacgccccccaccgcggggtcgcgagcccaggaagcgggacctggttggggatcctggcccgtcccctcccttttgacggggactcggccccggtttcttcccagagacgccggggctggggatggcgccgccgctcgcagccggtccctcccctcccctgcacccctcagccgcgggattggaagccgggcgcttgtgcaagagggtcctggggccgtgcggggacggggaggccaccccacgcccacttaatcggatcccaccccgagtgacggatgtccaggtgggggagacggctgcatcctcgggcctctgggcaacccctctgggctgaatgaatgaatgaatggcgttgggggagtcgggactccatttcctgggtagatgtcctgggccacagcgccactcctgacctcctgcctcagaccccagagaaaacccgtcacacccagggccaagggccacaccctccatgcaacccatccctggccagatgtcctacgcccactcctccagggtctaatttaaatcccacctgccgggaatggggccagtcctcctcccctatccagaaaggtctcatctcagtgtctgtcactcagcccccagccccacagcctagagtgcaccccccggcgagggaggggaaggaatgaggaaagacagcccctagaatccagatccaaagatgggaagatggttcacacacactcccgcctcagcctggcagaagacaggagctccccgccgccgggaaccacagccagggaggaggcagccgccctgggccgctgccaggtcaccagcaggaagccaaggcttccgcaggaaataagaggtcccaaatggctctagcccctctgatccacagtgctggtgacactgccccgagctgtgacctcagacgaggttcaagtccagtcttggcccctcatagctgtgtgactttgtgcttgtcaatctactcctctgggcctcgttttaaatgggaatcctaatctgtacttttcatggaatggctgtgggaaagaatgtgcccattcagacacactcatttccagcttctcccctttcaagctctatgaccctggacaagggattcacatgctgttcctcagtttccccaggtgtacaatggggataataatagtcactaccccagagggttgtgtgtgaagcttcattgagttagcacactgaagggcttccgcagggcatggtgagcactccatgggagctgctgttcatcagaagagcaatgacaggccaggcgtggtggctcacgcctgtaatcccagcactttgggagcctgaggcaggcggattacttgaggtcaggagttcaagaccagtctggccaacatggggaaaccccgtctctactaaaaatacaaaaattagctgagtgtggtggcatgtgcctgtagtctcagctacttcaggaactgaggcaggagaattgcttgaacctgggaggtggagggtgcagtgagctgagatctctccactgcactccagcctgggagacgggcaggggggaaggggggaacggggggggaagactccatctcaaaaaaaagagcaatgccatcatgaaggtgctctcgcccccccacacagcctgtgggtgcctgttctgggctggtctgagcccacagaagccctggggagactgggctgtggctggggataaacagatgtactgcaggagagagtgccctgggcttgatccctgcagggaggggctctggaggtttccacagctgtgacttcctccctcaagttccactccccttttcctctttgccaaggttgactgagagagtgtcattgtgaagtgacagtcatacgattgccatgaggaagaacttcccagggggaccgctgtttacatactggggactctgccctctttttgaagaaccttttcttcataaagagtcttgaggccgggtgtggtggctcacacctgtaatcccagcactttgggaggctgaggtaggaggatcagcatgaggccgggagttcaagatcagcctgggcaacaaaatgagaccctgtccctactaaaaaaaaattagcctggtgcagtggcacctgcctgtagtgccagctacttgggaggcagaggcaagagtacctcctttagcctaggaggtcaaggctccagtgagctaggatcatgccactgtgctccagcctgggtgacagagtgagaccctgtctcttttaaaaaaaaaaaaaaaaaaaaaaaggaagaggctcaagcccctccccccaactcccagcacctttgccttcaagctctgttgtgtccaagagacagacattcattcattcagtcagtcggtcaatcagtgtttcctgacccctgagcacatggcaggtactgtgagcagtaagggcagtgacacccatctgagcctgatgctgaggggaatgtcaggagtagatgtgctgggcagagaggacctgggagtaaggccagccctgttccagctttgagacaagtctgagggcaactgccccagaggctcagtgctctcgtttgtcaaactgggtaagagagcccaccttgtgggttggtgcgggaggaaatcaaatcagcaccgcagggatggctcctttcccatcatccctgagcccgctgggctgttggcctgagggtttttttttttttttttgagtcttgctctgtcaccctggctggagtgcagtggcgtgatctcagctcactgcaagctccaccttctgggttcacaccattctcccgcctcagcctcccaagtagctgggactacaggcgcctgccaccacgcccggctaatttggtttttatatttttagtagagacagggtttcaccgtgttagccaggatggtctcagctagtctccacctcctgacctcgtgatccgccccccttgggctcccaaagggctgggattacaggcgtgagccactgcgcacggccggcctgagggttttaaggtacaaggagcaactgttgaatgggcctagggagccgtgggacagccagggcttcagacagggtgatgtgaaaggagaagagagcctgggaaatggataagcagaagccacgcccccctgacctgggagccgggtcctgcccacctgtccacgcaacccccccaggaacttcaaatgcttctacctccctgtgtgctggatgcttcgggactatcatcctagagatgagaaatggaagcccagagaggcaaaggcacttgctgtatgaaacacagcatcaaaaaagaaattcttaggaacaaatgatgggcaaaaagacaaaaccctgtctctacaaaaaaaattagctgggcatggtggcctgtgcctgtagtcccagctatttggaggctgaggtgggagaattgcttgagcctgggaggtcaaggctgcagtgagctatgatcgcaacactgcactccagcctgggtgacagagagagactgtctcaaaaaaagacttatacacgaaaactgtaagctgggcatggtggctcacgcctgtaatcccagcactttgggaagccgaggctacaagagtgataagtaaataaatgaatgaatgaatgaatgaaaggacatcacaaccgaggttacctggcagggttgatacgttagccatgtaccctgtgcacagtgagccctctaggagtgttgaagccagagtgcttggggatggggctgctcagaggctgggggtgctgtgcccacagcagctgcctggggcactctggactctttgggtagaaattttagaagggctcgccgggcgctgtggctcacgcctgtaatcccagcactttgggaggccgaggcgggcggatcacgaggtcgggagatcgagaccatcctggctaacacggtgaaaccccatctctactaaaaatacaaaaaattagccgggcgtggtggcgggcgcctgtagtcccagctacttgggaggctgaggcaggagaatggtgtgaacccggaaggcagagcttgcagtgagccgagatcgcgccactgcactccagcctgggtgacagagcgagactcgctctcaaaaaaaaaaaaaaaaaaaggaaaaattttagaagggctcagattgggggatgaaggagggagcccagaaaatcagcagcctaccccgcacccgcccagcttttccagcttagtgagctttttcagaggctcttgtgaaaccacagatgcctagcaccatccctaccccggcctgaggagttgatccagccagtctggggagggccctggcatctgcatatgtaaaaggtgctccaggtggtctgggaccgtagatgaaccctgacagaggctgtccaagggtggggctggtgagctctacccgctctggagccccagaacatccactggctgcctgccctgctaaggccacagctctacagcacaggaggaaggagtgaaaagaatgtctgtggccgggcgcagtggctcagcctgtcagcccagcactcagggaggcaaggcgggtggatcacctgaggtcggcagtttgagaccaccctgaccagcatggtgaaaccccgtctctactgaaaatacaaaacttagctgggcgcctgtaatcccagctactcgggaggctgaggcaggataatcgcttgaacctgggaggcagaggttgtagtgagccgagatcatgccattgtattccagactgggcgacagagcaagacttcatctcaaaaaaaaaagaatatctgcaatagaaccacctgataccattccccaagtctcagtttacccatctgtaaagataggcctgcagggctgaccgtttattagtccagacttgactttgcatctcctcactgccagacctgggctgggcacgggcatggaatgaagataagcatccctgacccctgccctcagggtggggactggatgaggatagaaaagtgagacccagagctccaaggaagctaatggctggatgcacgagcaccatgggggcttggggcactgtccaggccccattctccaattctgggccatacccagcagaaagaccgacacacgcaaggaaacaagacactactggccaagcacggtggctcatgcctgtaatcccagcactttgggaggccaaagtgggcagatcacttgaggtcaggagttcgagaccagcctggccaacatggtgaaaccccatctctactaaaaatacaaaaattagctgggcatggtggtgcatgcctataatcccagctactcgggaggctgaggcaggagaatcgcttgaacctgggaggcaaaggttgcagtgagctgagatcaagtgactgcactccagcctgggtgacagagtgacactccgtctcaaaaaaaaaaaaaagatacggtaagtaagaaccgacggaaagaagagccagataaaggacacaggaagacatgagctttgggctctgtcagaccaggtgcttactgttttgtgttttgttttgtttagttttttgagatggagtctcactctgttgctcaggcaggggtgcagtggtgtgatcttgcctcactgcaacctctacctcccaggttcaagtgattcccctgcctcagcctcctgagtagctgagattacaggcacgcgctgccacgcccggctaattttttttatttttagtagagatgggtttcaccatgttagccaggttgatctcgaacttctaacctcaggtgatccacccgcctcggcctcccaaagtgctgggattacaggcgtgagccaccgcgcccaggctgatgtttattgtttttaaggaagcaagaggagaaggtgcctccccaaatgacctttctcttttctgtccacagacagcagccctctcgtgggcagcacgcccaccggttatgggaccctgacgatagggacatcaatagatcccctcagctcctcagtttcatccgtggtaagtgggcagagtggggtggggaaaagctgcagggggtgaatgcccaggcccacccagacaccccaacttcctactccagccccgttcccaccccgacctgggccctctctcgctgcgttcgcagaggctcagcggctactgtggcagtccatggagggtcatcggctatcacgtcgtggtctggatgatggctgggatccctttgctgctcttccgttggaagcccctgtggggggtgcggctgcggctccggccctgcaacctggcccacgccgaaacactcgttatcgaaataagagacaaagaggtgagagtcaggctgagcctggggctagagaagcgcagtgagggtcagggtcgggggtggaggatgcttgggtgccaacccggccactgactttccatgggacattaggcaggtcccgctcttctctggacctcagctttcccatctgagcattgggcagaagggacgggtcgggtggtttctggagggctctccatagccttgatttctgccttctccagcaggggccgcctggctgtaggacagggcctgggaggggaggggactcttctgagactgagtccatacctctgtgttccaggatagttcctggcagctcttcactgtccaggtgcagactgaggccatcggcgagggcaggtgaggcagccccattgccccttcccagaagcccctgctaccctggcctccccaacttccccaaccctcggcccccccataaaggctgactctggcgcctcccatcctagggagggaagatggctctgtgagcacagggaggtgccagggcagctcccagagctcgagagtaaccctcacctgcttccccagcctggagccgtccccacagtcccaggcagaggatggccggagccaggcggcagttggggcggtaccagagggtgcctggaaggatacggcccagctccacaagagcgaggaggcggtgagtgtcggacaggtgggttctgaaaaagtccttgcccctctctcggcctcggtttcatgatctgtgcaatgggagagtcagacttcatgttctcccaccaccttttagttctgttgtcccaaacatccaggatgctgtctgagcacgtttacactttcaggcctctccccacctctctgtctggtgacaccagtccctgccccctacccccatccctcggctcccagcataagcacactgcttctggggccggggccagcttccaacccatcctctcctctctcccacccagaagcgggtgctgcggtattacctcttccagggccagcgctatatctggatcgagacccagcaagccttctaccaggtcaggtaggagtcagggcctgtgtggctcatgtcacctcccagagtggcactggtttgggcacagacggtggcatggcatggcctgggctcccctctcagctctgatgcttttgctgtctgaaaccttgggcaggttactgagcccctccaggcctgggatctctgtctataaatagggcatgaagataacttctgcctcctaggattgttttgatggtgaaatagataataatttatgtagagcttggcaccgaatgtgatctgaggttgtgacaccactgtgaatcagactatcagctctgtactcagactgtctgcttggggtttagtcactgctctgccacctacaaaaggcttaagaaacatgagctcaggctgggtgcggtggctcacccctgtaatcccagcactttgggaagccaagacaggtggatcacgaggtcaggagttcaagatcagcctggccaagatgctgaaaccccatctctactaaaaacacaaaaattagctgggcgtgatggcatgtgcctgtaatcccagctacttgggaggctgaggcaggaaaatcgcttgaacctgggcggcagaggttgcagtgagccaacatcgcgccactgcactctagcctggatgacagagcatgactccatctcaaaaaaaaaaaaaaagaaaaagaaacacaagctcaccacacaccttagtttgtgtgtatgtgtgtgtgtgtgtgtgtgtgtgtgtgtgtgtgtgtggtttttttggtttgtttgtttgttttttaagatggagtttcactcttgttgcccgggctggagtgcaatgccgcattctcggctcactgcacctccgcctcctgggttcaagcgattctcctgcctcagcctcccgagtagttgggattacaggtgcatgccaccacacccagctaatttttgcatgttttgtagggacggggtttcaccatgttggccaggctgttctcaaatacctgacctcaggtgatccacccgcctcagcctcccaaagtgctagaattacaggcatgagccaccgggccctgctcacacactttagtttgaatgccgcagaagcagacccccagacaagggctcaagggcagggagtttgttttgaagctgatcccaggcagtgctggggaagggatggaagcacggagggaggttatgctggctgccacagctgtggacacccggacttcagtcgcctggggatctccttgggccagcgtagaccacacacctctgggcgacctcacacagggagtgaggacagttaccatcaaattccctgccattatcagtcacgggacacaaagtcttccacgctttccgggctcacaggcaggggattcacatgcagccagaaggcctcaggtaaagacaggtgttttcagggtccagctgtcatgtggaggtgaggcagaggggagatggggatggcagcaacagcctctgctgcatgatggggataatagcaaaaatcacccgtgcattcatcacttagcaagtggcaggcacgtccaaagcagtccccgaggcttgccccacttaatctacccatggccctatgtggtaggtgctgtcactgcccccattttgcagatgagaaaactgaggcacagagaggttaagtgacttgcccagggtatcatcagtgtaaatagtgcccttatcactaaataacagctactcttttcactgttcatattattagcatcatctctcgctgttctccttcttcagtgacttggtttggaacccagtgagaggaacaaaagggcaaagccaagccttgggttcaagggggcttacttgctcccaggagctcagtgtggcagaacggggatggggggcctagagcccatagtctccagcctgcacagggtgggggatgcagacctcaggccccatggcccatgcgtgtcccctcgcacccacccccagcctcctggaccatggccgctcttgtgacgacgtccaccgctcccgccatggcctcagcctccaggaccaaatggtgaggtcagtgctgccctggaccggggtgccctgagaactggggctccttgtgttgccccccaatgtggttgccttccagtcacctgccttctctgggcctcagttcccccagctgaaagtggggagctccttcaccccgggagggtccagccacagctcctccttctgatggcttggcctcatcccctcttccaggaaggccatttacggccccaacgtgatcagcataccggtcaagtcctacccccagctgctggtggacgaggtagggctgtccctgggtcttgccccagccctgcctggcgtgctgtgtgaccttggcccagggcttgcctcctctgggccactttacggtggcaaccagaccagctgtccccttctccatagtggatcgtcatctcagaacctgccgcagtcagcctagccagagagaccaggtccaggaattggaggttctgcccaaggcttgggtcacagattggggccccactcatagggattggaggccaagaggcaaatccacgcagcctgagcatctatggggtccccagagacacgccctagagcctgggtcctctctgtgcgtcctccactttcatgctcccaacagtcccgtgggttgggcctgggactgcactgttcacacctgagaaatccaagcttcagttggaggctgtgacatggccaaggtcacacagggacaaagagaagccagtgacctggacacaactagaataaagtgtgaacatcccagccctctgatcgggggcaggcaccatgaaagagatctttgagtctggccccatagaaatcagtctgtcacttagaagctatgtggttttttgttttttgtttgttgtttttttttttgagacagagttttgctcttgttgcccaggctggagtgcaatggcgtgatctcggctcactgcgatgtccacctcctgggttcaagtgattctcctgcctgagcctcctacatagctgggactacaggcgcctgccaccacgcccagctaatttttttttttttttgtatttttagtagatacggggattcactatgttggctaggctggtctcaaactcctgacctcagatgacccacctgcctcggccttgcaaagtgctgggattataggcatgagccaccgcacctggctggaactatgtggttttaggccagtggcttcacctgtccatgccttggtttcctcatctgtagaatggagctaatggtggtaccggccttgtagaattgtcattgccattgtatgacacttagataaagcacttggcgtgtagtgggggttcagtaaatacccttatcctatttatttatttgtttattttttttgagacagggtctccctctgtcactcaggctggagtgcagtggcgcgatctcagctcactgcaccctccacctccccagcttaagtgatcctcccacctcagcctcctgagtagctgggagcgtaggcacaggccaccccatcaggctaatttttgtattttttgtagatatggggtttcgccatgttgcccaggctggtcataaacccttgtcctctttagagcggagaaactgagggccctggggatgtctggttgggtggggatgggattgaccaggagaaaggcctggctccagtcctttggcagccactgggccctctgctcccatgggcacaggagacccagcctgtggctgggctgccctgggggacgcggccctgacgctgcctcccgcccctcccccaggcactgaacccctactatgggttccaggccttcagcatcgcgctgtggctggctgaccactactactggtacgccctgtgcatcttcctcatttcctccatctccatctgcctgtcgctgtacaagaccagaaaggtgagtgccataaggtgggtggggacgggacaggtgggtccccaggggcccccacccactcacggccctcttgtcccctgcccacagcaaagccagactctaagggacatggtcaagttgtccatgcgggtgtgcgtgtgccggccagggggaggtgaggagctagggcccagggggcgggggcaggagtgggagggtgggggggcatggctggggctggccccacctagctgagctcctctcctgcctgcctgcagaggaagagtgggtggactccagtgagctagtgcccggagactgcctggtgctgccccaggagggtgggctgatgccctgtgatgccgccctggtggccggcgagtgcatggtgaatgagagctctctgacaggtgagcccccagcccctggcctgcagcttccttcctcccctgccatccaaccctttgccctgcggcaaaagttttcatttgagtttccttttccttttttgtttttttgtgagacggagtttcactctgttgtccaggctggagtgcagtgacatgatctcagctcactgcagcctccaccccccaggttcaagtgattcttgtgcctcagcctcctgagtagctgggaccacaggtgcataccatcacgcccagctaattttttatttttagtagagatggagtttcactatgttgcccaggctggtcttgaactcctgacctcaggttatctgcccacctcggcctcccaaggtgctgggatttcaggcgtgtgccagcgctccgcctcctcttcctttttctctcaagcaacaatcccagctttaggacttgctaacctcacacccctgggccgttaccacgtatcatctccgtgcctcagttccttcttctgtaagatggctgtcagtcactcctcctggacagagttgtgcaaagtgcttaggagcgtgagaggtgcagcataaatggccagccacccagtgcatctgggctatttctcctttttttttttttttttttttttttgagatggagtttcactcttgttgccccggctggagtaccatggtgcgatctcagctcactgcaacctccacctcctgggttcaagcgattctcctgccttagccacccaagtacctgggattacaggtgtgcgccaccatacccggctaattttgtatttttagttgagatggggtttcaccacgttggtcagactggtcttgaactcctgacctcaagtgatctgcccgccccagcctcccaaagtgctgggattacaagcatgaaccatagcacctggctgcatctgagctgtttctataccagtgcccaccttcaggtcataaagattccagatggcacaggagagtgggaagccctctcccagagtgagagactgcggtccccattcactaccccacagtccccttcccttcccctccccagggcagccactgtgaagggtgtgaggtgtcttccacgcctttttctgcattacgtgtgtgcacatgggctgatttgcctctccttttgttctgaacgtgggattgtatgctgtgtattgttccatactttgctttttctcctggcatccttccacaagcacggatggccccacctcatggctgcatgagagtccacaatacggatgtatcgtaactgactcaaccggcccgctcgccatgagtatttagaatgtgattttccagccattgcaaaggacgccacaggagcagctttgtcctgtgtctcttgatgtgtgcaagtatttctttctctgagatgtgttatattttggtggtagatactggagagagtttactaaaaaccacaggatagtggtttttttccagggaagttttctggctggcattgtatttgtatcacaaatcgtaggccaggcgcagtggctcgcacctgtaatcccaacactttggcaggcagaggtgggtggattgcctgaggtgaggagttcgaaaacagcctggaaatcatgttgaaaccccatctctaccaaaaatacaaaaaattagccaggtgtagtggtgcacgtctatcgtcccaggtacttgggaggctgaggtgggaggatcgtttgagcctaggaggtggaggttgcagtgagccgagatcgcaccactgcactccagcctgggtgacagagtaagactccgtctcagaaaacaaaaaaaaagtagtaattgtgatcagtatgatttgtgggcacacgccctgagccctgccctccacaaactgtccacacatacttcatctgctcatctcttgtgaggcagacatggcaggattgtctgactcccttgcaggaatgtgcacacagtaggtgctcaatagtcccagcctgcaggcattcagtaagggagtgccactgtttgctaggcagcctgcccaggacttcacagggccatggcgagcatgcagtgcttttctcactccaactcatggaaatatttgccccctccatgtaaatatttctctcccctccccctcctccttccccctccccttccttaccccatcccctcccctcccctcctcttttgagacagagtttcactctgttgtccaggctggagtgcagtggcacgatctcggctcactgcaacctccgcctctctggttcaagttattaccctgccttagcctcccaagtagctgggattacagatgcccaccacaacacccggctaatttttgtattttagtagagacagggtttcaccatgttggccagcctggtcccgaactcctggcctcaagtgatctgcccacctcagcctcccaaagtgttgggattacaggcgtgagccaccgcatctggccccttgtaaatatttctgttggttggagttagaaaagcactccatgcatgttataaaataattccagcagaaagagaacgactcccccaccctgccccactgcacacatgatgcccacacatgctctgtctgacccacccccccccgctggttccagggagctggctgccacctgcttccaggagtgtctccctgtgcctttatatctccgtcctctctgagcctcagtgttcctctctgtaaaatggggctgtgatttcttgttcacacctggttacagagttaactgagacttagagcttgtgggacaattctacacagaactcctggtttgctggtgggagggaggggtgtggagtggtcctcacaccacgttccccaccaggagagagcattccagtgctgaagacggcactgccggaggggctggggccctactgtgcagagacacaccggcggcacacactcttctgcgggaccctcatcttgcaggcccgggcctatgtgggaccgcacgtcctggcagtggtgacccgcacaggtatgagccgggaggctgggcttgagagagatcccgggctcagcacccttgggagaggtggagtgaggcagggtgggacctggaaccctggaccccacgcccacctctgctgctgccctgctgtgggacctcgggccagttgccccccatctggggtctgagcattcccatcttagcagaagttgggccagactaaggccaagcattgcaagatctggaggagccgccggggttacagtgctggagcgggcagggatgtagcgggcaggcaggagccttccctgtgtctggattttcagtggaaccacccagtgtttagatgctatccactagttccttgtttaaagcccttaaaaagcctacaagagccgggccagacctgttaggactccacactgctgatggctaatttcacaaacatcatgtcttgcaactccagaggcacgggtcgggagggctaggggtggggaaggcctgccctcaccctggcttccctgccttggggtccccgcctcctccccagggttctgcacggcaaaagggggcctggtgagctccatcttgcacccccggcccatcaacttcaagttctataaacacagcatgaagtttgtggctgccctctctgtcctgggtgagtggccccctgcaccctcctctgcccatagccccccccacctgggtcccaaatcccactcagtccttcgctgtccccacagctctcctcggcaccatctacagcatcttcatcctctaccgaaaccgggtaagccttgggggtggggtggggggtgctgccagcagggcccaggggccaaccagccaggtgctcacattcatggtgccccctgccaggtgcctctgaatgagattgtaatccgggctctcgacctggtgaccgtggtggtgccacctgccctgcctgctgccatgactgtgtgcacgctctacgcccagagccgactgcggagacagggcattttctgcatccacccactgcgcatcaacctggggggcaagctgcagctggtgtgtttcgacaaggtggggccgcaggtggggttggtgcaggggagcgggacagccacaggcgccccagtgaggcctccacacccgcgttattctctcagcagcacccacaggatgccaggtcctgtctagggatggaaacccccagaggatccaccccatcccactcctgccctcactgggctcacggtctggcagatgaaatgtctagaatcatgtattcatgtgttcaagaactggtggggggccgggcgcggtggctcacgtctgtaatcccagcactttgggaggctgaggcagatacatcacttgaggtcaggagttcaagaccagcctgaccaacatggcaaaaccccgtctactaaaaatacaaaagttagccaggcatgatggcacatgcttgtaatcccagctactcgggaggctgaggcaggagaatcgcagaggttgcagtgagccaagatcatgccattgtactccagcctgggtgacagagcaaaactcaaaaaaaaaaaaaaattactggtggggacctggggccctagtgtgcatcccgtgctgctcccaacccttggggcccagcagtgaccaacacaggcatccttgtggtcactggagtgtgtgtgtcccccaccaaagtaagtgatccaggagtgcacaaaggagctgctggggctgaggagtgggcagtgggttttaggaaggaagccagtgggatagcttgatgggttctagatggggacacttccttagagagaaggcagtcaaggaagccccctgagcaggtccctcagtgacctcagtgaggggcaggtcgaggagaagcaagggtaaaaggtgggagtgtcatagcacagatgtaccgtgtgcctggggcacagggagtggcgtggcacagatgtgctgcgtacctgagcacagggagtggtggagcaggacagggccgggtaggcagtggcctggttgacagaggctaggtgacattcagaggctgtcgggggccacagagcgcttttaaactggggagggggcccagcgcagtggctcatgcctggaatcccggcacttcgggaggccgaggcgggtggatcatgaggtcaggagttcaagaccagcctggccaatatggtgaaaccccgtctctactgaaaatataaaaaattagccaggcacggtgacatatgcctgttgtcccagttactcgggaggctggggcaggagaatcgcttgaacccgggaggcagaggttgcagtgagctgagatcacaccactgcactccagcctgggcaacagagtgagactccgtctcaaaaaaaaataaataaaccggggagggggatgaccagattcttatagttcccaggctagccaaggagccagacgcgtacttgggcagttagagtctaggatggggaacgcaggcactgactcatgcgctcattcaacagatatattgaggctgggcgtggtggctcatgcctgtaatcccagcactctgggaggccaaggcgggtggattgcctgaggtcgggagttcgagaccagcctgaccaacatggtgaaaccccgtctctactaaaaatacaaaaattaggtgggcgaggtagcgcgtgcctataatcctagctgctcgggaggctgaggcaggagaatcacttgaacccgggaggtggaggttgcagtgaactgagattgcgccactgcactccagcgcgggcgacagagcaagactccatctcaaaaaataaaaataaataaaaataaaaataaataaataaataaataaataaatgagagagagagagcgagccaaccgtgggccgggtccttaaccacaatgcacaagtgtggggaagtgaagaggccatgggtaggagcccagagcaaaccacctgccctaacttgggagttaaggaggaagacaccctggaagagatgatgctagacagagagacggtgggggctggggagggggaccccagcagagggaatcacatgtgccaaggacagcagtcaagaaaggtcatcttttggctccagctcgagttcctggggttcccatagggtccgccgggcctggggtttggaggcccagctcagcagggtacccccatcccaggactcatcgctgccccacccacctgtctcccacagacgggcaccctcactgaggacggcttagacgtgatgggggtggtgcccctgaaggggcaggcattcctgcccctggtcccagagcctcgccgcctgcctgtggggcccctgctccgagcactggccacctgccatgccctcagccggctccaggacacccccgtgggcgaccccatggacttgaagatggtggagtctactggctgggtgaggaggccaagcaggtcagccccctgcctctgggcagtggggcctaacgaatcccaccctgtcttccctctccatctttcagggtggtctcttattatgcccaccattaataataataggccaggcgcagtggctcacacctgtaacgtggctcccggcgctttgggaggccaagacgggaggatcacttgagcccgggaccccagcctgacctacatggcaaaaccccatctctgccaaaaatacaaaaattagccgggcgtggtggtgcatgcctgtagtcccaggaggctgaggtgggaggattaattgagcccgggagggcgaggctacagggagctgtgatcacgctactgcactccagcctgggtaacagaacgagaccctgtctcaaaaaataataatgataggccaggtgcagtgactcatgcctgtaattccagcactttgggaggctgaggtgggcagatcacctgaggtcggaagtttgaaagcagcctggccaacatagtgaaaccccgtctgtaataaaaatacaaaaattagccaagtgcggtggaacatgcctgtagtcccagctacttgggaggctgagggcaggagaatcatttgaatccgggaggcagaggttgcagtaagccgagatcacaccactgcactccagcctaggtcacagagtaagactctgtcttaaaataaaagtaacataataataatggcaaggcctcaggctgagtgcctactatgcgccagcgcacggccacagaggcctggtctcatttcctcttccccaagccctagcaagcaagctcaaatgttgcttcacggatgctgaggctgggagatttggagtgacgtattccaggtcacccaacagcttgtaagtagcaaagctagagtttgaatttgagtccaccgggctccaaagcccacattcttaacccaccattcagtctcccatgaaggaagtcttccctgagtctagctcaaatctctctgtgagccaaagcccccagacaccaaacttccctgcctgcctgccaggtcctggaggaagagccggctgcagactcagcatttgggacccaggtcttggcagtgatgagacccccactttgggagccccagctgcaggcaatggtgagctgaggggggcctgttgggtgcagggcagaggggtgggctccccagccagcacctcagctgcctctccaaccctgcaggaggagcccccggtgccagtcagcgtcctccaccgcttccccttctcttcggctctgcagcgcatgagtgtggtggtggcgtggccaggggccactcagcccgaggcctacgtcaaaggctccccggagctggtggcagggctctgcaaccccgagacaggtgcagggggaagcccctgagtccccctggttgggcattggcacagaatggggtgggtacccagcctctgtccctgccatcccctccttgtgacacctgcctctccctggcagtgcccaccgacttcgcccagatgctgcagagctatacagctgctggctaccgtgtcgtggccctggccagcaagccactgcccactgtgcccagcctggaggcagcccagcaactgacgaggtgggcctgtctcctgtcccacccactctgaggactaggcagagggaggctctcacgcaggcagagcccaaggaagatgccctgcctggtggctgggagaggggccctggccactgcatgacctctgatccaggtctgcccaccctccagggacactgtggaaggagacctgagcctcctggggctgctggtcatgaggaacctactgaagccgcagacaacgccagttatccaggctctgcgaaggacccgcatccgcgccgtcatggtgacaggtacaatggcatgtaggggcccgggctagcagggcagaatccgccccttcctggcagagaagaggggcaccagggattcctttttggggcatctttttgggcccttgcttcaggccaggtcctttttaaacatttcgtgaatcttcacaatatcccccccgcaagtggtaattgtcacccctgtttgacagatgaggaaactgagactcagaggagtggagtgacttccaaggaacccatgtgcgctgtcagacagcctgggttccaggtggcacctctgagaaatggggataatgatgtcagcctcagaggctgtgacaagctcaaggagcaggaagagaaagattctggccgggcacggtacttcatgcctgtaatcccagcactttgggaggccaaaggagaaggatgtcttgaaccctggagttcaagaccaacctgggcaacatggcaaaactccgtctctacaaagaatacgaaaatggccgggcacagtgtctcacgcctgtaatcccagcactttgggaggccgacgcgggcggatcacttgaggtcaggagttcgagaccaacctggccaacatagtgaaaccccgtctctactaaaaatacaaaaaattagccaggtatggtggtggatgcctgtaatcccagctactcgggaggctgaggcaggagaatcacttcaacccgggaggtggaggttgcagtgagctgagatcacgccatttcactccagcctgggcaacagagagagacccagtctcaaaaaaaaaaagattctagctagggtgagacagcaggagctaagaggtctgtgtccttgtcctccccgcccctgcacacacacatatgtgcacacacattcatgggcacttggcagcagagtcacacagcagtaaggagtatatgtagcctgggcacatggctcgtgcctgtaatcccagcactccgggaggccgaggcagggggatcacctgaggccaggagttcaagaccagactggccaacatggtgaaaccccatctctactaaaaatgcaaaaaaaattagcctggtgtggtcgcaccctcctgtaatcccagctactcaagaggctgaggcaggagaattgcttgagcccaggaggaaggaggttgcagtgagccgagatcaagccactgcactccagcctgggccacagagagagactcttgtcttaaaaaaagaaaaaaaaggagtatatgtggagctccagcccacggctccaggttctcctaagacccttcaatgcctggatctacagatgagaaaactgaggcaaagggatgttggtaacctgcctcagctcacttggctggtggtggcagacggatttcatccagcctgttttcccatctgtaaggatcaggatgaggatggcctccccggatagcctcagaccctcaccttgccccataacccccaggggacaacctgcagacagcggtgactgtggcccggggctgtggcatggtggccccccaggagcatctgatcatcgtccacgccacccaccctgagcggggtcagcctgcctctctcgagttcctgccgatggagtcccccacagccgtgaatggcgttaaggtgaggctaacccagagttccagctgtacctcacccagtgaccccacccctgtgtcacctgacccaggccccaactctccagggtgggcagggggagctaagctgagcttcctgggcccccaggatcctgaccaggctgcaagctacaccgtggagccagacccccgatccaggcacctggccctcagcgggcccacctttggtatcattgtgaagcacttccccaagctgctgcccaaggtagggccgcccccagctccctggccgccctgcgcctcccctgctctgtctccttcctcacggctcgctctccctggtgggtgcctcagccctcccccatctccctgtgctcccaggtcctggtccagggcactgtctttgcccgcatggcccctgagcagaagacagagctggtgtgcgagctacagaagcttcagtgagtgctcggcagagggtgtgggcaagggcctgcggagactgagcttgtccgttcgtctgttcatctgtccttccccagggccctgtctccctcctcaggcaccagagagctgtcacccctcctcaccaaaagcaggcaggctctcccaggtctttcatgctaaaaataataattgtaggctgggtgcggtggctcattcctgtaatcccacctctttgagtggccgaggtgggaggatcacttgagcccaggagtttgaggccagcctgggcaacaaagtgagaccccatctcttattaaaaatttaaaaattagccaggtgtggtgacacaccggtcatcccagctactcaagaggctgaggcaggagggttgcttgagcctgggaggctgcggctgcagtgagccatgatcacaccactgcacttcagcctgggcaacagagcgagactccgtctcaaaaaatagtaataggccaggcgcggtggctcatgccagtaatcccagcgctttgggaggctgaggcaggcagatcacctgaggtcaggagttcaagaccagcctggccaacatggtgaaaccctgtctctactaaaaatacaaaaattagttgggcatggtggcgcacaccagtaatcccagctactcaagaggctgagggcacttgggcagcagaggaggttgtagtgagcagagatcacgccactgcactctagcctgggcaacagagggagactctgtctcaaaaaataataggccgggcacggtggctcatgcctgtaatcccagcactttgggaggccgaggcgggtggatcacctgagatcaggagtttaagaccagcctggccaacatggtgaaaccccatctctactaaaaatacaaaaaattagccaggcgtggtggcgggcgtctgtaatcccagctacttgggaggctgaagcaggagaatcacttgagcccaggaggcagaggttgcagtgagctgagatcatgccattacactccagcctgggcaacaagagtgaaactccgtctcaaaaaataataataataatgataataataataataattgcatctattcactgagcgcctcctgtacaccaggcaccatgtggcattaggggcccagctgtcatcatattctgccagcccacccatggggtggtggggtaattccccaggccacacctgtccacacctctcttcaggtactgcgtgggcatgtgcggagacggcgccaatgactgtggggccctgaaggcggctgatgtcggcatctcgctgtcccaggcagaagcctcagtggtctcacccttcacctcgagcatggccagtattgagtgcgtgcccatggtcatcaggtaaggcaggcagggaccggtgggtgagggctcagcagggctggtcagccaacctgggtcccctaatgtccgtgccctgccacccagggaggggcgctgttcccttgacacttcgttcagcgtcttcaagtacatggctctgtacagcctgacccagttcatctccgtcctgatcctctacacggtgagtatctgcagagctccgtacccagagccgtcccaggactagggaggggacacagccctgtgccttggagctggcaggtcccagaatagatgacgtgggcccagatcctgaccctgccactctccggctgtgtggttggagaggtggcaaggcttgggggagatgagaaaaacaccaggcacggagcctggtacccactaggtcctcacaaatggcagcagctgtcatgggctaacatcttgaccgcaactctgggagctccccaatctgcagggaagactgaacggaggcagggccaaaaccctcgcccccgccccatccccacaggtctgcccatttccccagatgcacttgctttgccccataccttggctgtacctcccacaccctacttggaggagctctcccctcccctgctctgggcatggcctgctcacccccagcgaatgaggtgacactgcagggcggcgcacatcttatacttgggtctgtccctgtgtctgcctgaaagcgaggagctccctgagggcaggaactgtgcatgccctggtagctatagggactccgcaaggcagagccgaagcctccccttcgggccgggagtttgttacagggagggaaacctcccctcagatttaggcccccaaggtcagcacaggtgccctttccatcagaccaggggtttgtctcacatcaagagcggcacctcctccgctgggctggcaggagagtacggcccccattagactgggggatgccttacccatcagattccttcggggcaggggtggggcctctgctatcagactaggggctgccagggccaggtcttagtttcccctctgtcctcccttccctgtggcagatcaacaccaacctgggtgacctgcagttcctggccatcgacctggtcatcaccaccacagtggcagtgctcatgagccgcacggggccagcgctggtcctgggacgggtgcggccaccgggggcgctgctcagcgtgcccgtgctcagcagcctgctgctgcagatggtcctggtgaccggcgtgcagctagggggctacttcctgaccctggcccagccatggtgagtagggagctgactgaccacccccatcccgccccttccctgtccaccccacgttcgttccctgacccccatccctgtacccccaggttcgtgcctctgaacaggacagtggccgcaccagacaacctgcccaactacgagaacaccgtggtcttctctctgtccagcttccagtacctcatcctggctgcagccgtgtccaagggggcgcccttccgccggccgctctacaccaatggtgccactgcgggcgcgggcgggagatgctggcggagggagggaggagccctggggtgctggggaggcagatgggagagaggtgccggccgagtggaagactggcgtgcacacgtgtgtctgtgggtgccgggggggcgtggctcctgcctgagagactctcctgctcccagtgcccttcctggtggccctggcgctcctgagctccgtcctggtgggccttgtcctggtccccggcctcctgcaggggccgctggcgctgaggaacatcactgacaccggcttcaagctgctgctgctgggtctggtcaccctcaacttcgtgggggccttcatgctggaggtggggcccgccctgggtctcagcagcgggagagaagggaggtgggggtgcattgaccccagctcagccccggctgcccctgacaccctccctgccctttgcagagcgtgctagaccagtgcctccccgcctgcctgcgccgcctccggcccaagcgggcctccaagaagcgcttcaagcagctggaacgagagctggccgagcagccctggccgccgctgcccgccggccccctgaggtagtgcaggcccacgggcaccccagacactggaactccctgcctctgagccaccaactggacccctctccagcaacaccaccgccaccacctcccacatccctgaggttggcgactgtctacactcctcccccgagaccacccccaccctggggaagcgttgactactgtcccctaccttggaccatcccgcgtaggggtggcagcccccagctcccctcagtgctgctgtcagtgtagcaaataaagtcatgatattttcctggctctgctgtgcctgtcttgtacctggcaccatagaccctcccacctgcccaggaggaaatgcacatacccccgggtgcccagctggcagcccctgcacgtgtctgcccctggaaccccctggggggctggtttttcaggctggtttttcagcctgacaaccccctggaaccccctggtttttcagactccattggccaactcccctctctgggcctgtgttccctcatctcacagtaataatgtttcctctgtgtccagcatgtgcctggatattccgtttagcttttttttttttttttttttttcttgagatggagtcttgctctgtcacccaggctggagtacagtggggtgatctctgctcactgcaacctccgcttcccaggttcaagcgattctcctgcctcagcctcccgagtagctgggattacaggcatgtgccaccacgcccagctaaattttgtatttttagtagagacagggtttcgtcatgttggccaggctggtctcgaactcctgacctcaggtgatccgcccaccttggcctcccaaagtgctgggattacaggcgtgagccactgcgcttggccccatttagcattttacacacattgtcatgtcatccttccaacaactgtggtactattcccattttacagatgaagaaaccaaggcttagaggttacacaagtagtcagagtggggccggatagctttgactccagcttcgatgttcctaaccctcctaccctcctttggaggacaaggagatgtaggcttgcctgggaggcatttgctagggggcagctccctctctcccaccttaccccctccccgtcccaccccagcatcctgggacatgtttgtgggcagttccttcctcagatgaaatccaggctcggagcccacatctcccagccagaaccacgcgcatcatccctcagggaagggtgggtgcctctgagctcatctcaccagcgggcccctggccaagcccctctgctctagagaggcagcttggccgtctggctcatctgggcaggggagaacaggaaagaccggctgtttcctgccttccaaaagccctggccaacctcattcctggaacccctggtgctatccccaggcctgccagagtaggggctgagaaaacgttgaatcatgctggggagaagggatgtgggtgtgaagatgaaagtcctgccaggaggcacatcacagtggacctctgctcctggcactgtgttgccagccagcgacggttcagggtggtagatgctgtttaagaggaagccacagagaggcctgggttcaaatccctcctctacccttagctgattattcatgaatctgttggacaggtgtgtgccaggcaccaggactaactcaacaaactgaataaaacgggacaaaaacatggtctaaccctgcgagcagttcaccatccagcgtgaaagcctggcagggaaggagcacatctccaaagacgtagtgggagcacagcaaccacagccccatcccctcccctgcccaaagaaacagccaggggaatgggtagaagcagcagagaggacatgggagccaggacacgaattgtcagctttagcccctcagtttcccagtttttcttttcttttcttttttttttttcagacagggtcttgctctgttgcccaggctggagtgcagtggtgcaatcgtggctcactgcagcctctacctccccaggctcaggtgatcctcctacctcaacctcctgagtagctgggactataggccagcaccaccacacccagctaatttttgtattttttgtagagatggggttttgccatgctgtccaggctggtctcaaacccctgggctcaagcggtccacccgccttggtctcctaaactgctgagattacaggtgtgagccactgcacccaacctccctccttttttcaagggtaggggacagcatttctgctgggtgagttcctctcttttgccagtgggattgctcctggcagcagtggggtctaagggcaggcagagagggctgggctggcctggcctgagggcccacctctctccaggtgacaaaagtctctgctgccctgcaatagacactggggggcggggcatgggaatgaaggaggcacagggcatatttactccctccctaagactcagagtctaagggaggtgggggaatgactggcgatgaagagatcagatggcaagggtctaaatcaggggccatcctcatctcctcccagcccgcagcccctacaactctcactcccgcctcaggcctaggctcctgggcagggctgaaggctgcccctcacgcagaggatctgcacccccagccagcttctccgggaagagtttagtgtacagttcactcattcattccaccaatgtttgctgaactgctgctctgagccgggctctgaacttaatgagcaaaactgaagatgagcaaaaacagccttggtcctggccttcacggggcaagatgacagtctcatcgggaagagggacagggctcagatggtcacagacataggccaacaagacaactgcaagcagtaaagctagaaagcacaaaaaaaggaaaaagggaaggcccctctgaggaagggagggtttgatctgtgaccccatggaggagacctcagccagtgctcgggaggaagaaacgcctcagtgtgggagggagaggggtttgggagaaaacccccaaaggccagtggctggaggaggaagaggaggcagagccaggctgccataaagggccggggccctggaagccacagggaagttgagcctctaacctgagtgaaaggcgatcagtagaaggggcacgatctgcgggggtgagggaggcaggacccacgtgggagagcccagagtggaggctatcgcagagcccaggcaaatgatggtggtgtcaactaaataagaaatcagccttttgaccaggtgcagtggctcacgcctgtaattccagcactttgggaggccaaggtgggtggatcagctgaggtcaggagtacgagacgagcctggacaacatggagaagcctcgtctctacgagaaataaaaaaaaaaaaaaaaatagccaggcatggtggtgggtgcctgtagtccccactactctggaggctgaggcatgagaatcgcttgaacccaggaggcagaggttgcagtgagttgaggatgcaccactgcactccagcctgggagatagcaagaccctgtctcaaaaaaaaagaaaaagaaaaaatccaccttttggccaggcacagtggctcatgcctataatcccagcactttgggaacccaaggcaggcggatcagctaaggtcaggagcctggccaacatggtgaaaccctgtctctactcaaaaaaaaaaagcaaaaattagcctggcatgctggcatgtgcctgtaatcccagctacccgagaggctgggttgggagaacctcttgaacccgggaggtggaggttacagggagccgaggtcacaccactgcactccagcctgggcaacagagttaaactccatttcaaaaaaaaaaaaaaaatcagccattgaaaaaattaaagttagttttattgagtcttactgaggactgcaccctgggagagggtttcagagagtttctgttagactgcgccaaagcagcatttcagcccacagtttagatacagaggcaggcggttctgtgtgtgctcagaagctatggtcaggcacggtggctcacgtccgtaatcccagcacttttggaggctgaggcgggtggattgcttgagctcaggagtttgagaccagactgggcaaacacggcaaaaccccttctctacaaaaaatacaaaaaaaaaaaaaaaaaaaaaaaattagccaggcatggcggctcttgcctgtagtcccagctacttgggaggctgaggtggaaggatcacttgagcccaagaggtgagctgtgatggtgccactgcactccagcctggatgacagagcgagacccggtctcattaaaaaaagaagaagaaaaatttacatcaaatgtcttcagaagctacactagtgcaaatctcgccaaggtttgggttcgaggatgcacctagttatatagattatagaggcataatcgtcaatcctgtcaggtgctatcttatgtacaggaaaaggcacagccaggatcatttaacttatattttctaacaatgcagtgattcaggcaagaggcgtgggagcctgtgttctgccctgcctgccatcttcaaggcatccttccgttgggctgcccccagtcactgagtcagggctttgtcagcttctgacaagcagaaagagcaaatgcggtttcttgggattgcaacttggtctcacagtggcttaggccagggtgggagcagtgaacggagtcacaaaagaaatttttcaggtagcattcacgggtgggtgctggattagatgcagggctaagggcaggggaggaagcctgggtaatggaaggctgcggggccaaggggggactgggaatcctggagggccaggtctgggggagagttaggaggtcgtgaatttggacttggatgcttgttgaagctgatgcatcttgaggacatttgtgggacacataggctgggtcagggctgaaagaggtgctggttatggccgggggcagggactcatgcctgtaatcccaacagcccaggaggatgagacaggaggaatgcttgaggccaaaatttcgaggccggaagttccagacgagcctgggcaacacagcaagaccctgtctctagaaaaggaaagaaagaaccgctggttgtggaagccagccatggcccagagctcagcagtgtaggagaggagggtgcgggcctgagagaggcagcaggcttggctggagaggcagaaggaaaaccaaggcaggagagtgtcctggaagctgggagaaggcagagggagatcgaggcttactttctggctgaggggcctagggtgagtcactttgggaggcttgatttcctcctctgtgaaatgggcaacacacctacccttgcccacctcacccccctcaccccgtcgacgtcgagtgaggagcagctgtgaggaggaggaagctttgcacagacgtgaggacggccccgggcgcctctaccccggggacacccccccccccaggagatggaaccccgagggcacggcgtggcggcccatgcgggcagctcgcgttaggacccagcggctccggggctggagggcgggcgccagccccgtcgggggcccggagggggactcggagcgggccaaggggcggctccggcgggcggactcggagcgggcggcggagtgacccggacaggtaggcgcgggcctggcgcttgggggccccggggggcggtcaggggcgtcggcgggtcccccggcgcgggggcgagggtgccaggctctctgggtcctcgatcctggggcagccgcggaggttcctgaaccccgcgccttcagagcggaggccaagggggcacctggaaagtttggggttgctctgcagagagaacgcgaattgggaagggcggggagcccgagtttggggggagccagaggtgaggtcgtcgggggatgggacatcttttgttctcccggggaggttggaatgtggcgggtggggtggggggggggggtccggtgggaatggccgagacagagacgcagagagacaaagagagatcagagacgggagcgcgagggcgcgcggagcaagtttccgcggctgattgttcccagctgtgcggcgctgcaacatctgggtttctcccgccgggacccctccccctgagcccggctctggagccggcagagccctccctccgtctgatgtctgagcgagcgtcggggccccctgtcccccacctcccaggacgcaggggagtcgggggtgggggaggccgcagctgtggaagaggccagaggtgggggtggggcagcctcccaggcaggtcctggcctcccgcacgccccaaaaccccttcgtctagaagagctcggagatgtggtcccgtgggaggagttcatgaactccacactgacttctctctttcctgcctccccgctagcccgtgggcctccttcccccaataagcctgggttcgggggccagtcctaggggaggaagactccccgcagggtaccgacaggcatcccccaacaccttgcaacccctcttgccccaattcagcgccttctgctgagcagcgggggctccgaccgacctgacggatggggagaagggcaaggaaggctctctgggtcttttcatccccctcccatgaggaggtcaagggttttcagaatggggtgtggggagccagctatccctcgcctctggggcagcttggtcctgagcttcgtctcccggctcccactccaccttagtgaggtgcctaatgcatgagaggagccagggggtcaggaggcctcaggattgagaggaaggagggaaagacctcctgctttctcccctttccctcccctctccctggactcccagtggggaaaatagaccaaagttggggtttccagctagctctctgaaaggacttcctgggttgcagccgggaggggccctcctggatggaccccgccctcgcagccctccctacagaaggctgacggacctgaggtggccctccactgagctggggctggatgtggggaaccggaggctcccccaagtcccaccgtgtagccaggactggaggctgggctcttgaatgtcaggagcctgatgaaagccacggaccccatgccctctccctccaaatgacacacacacttgcctacagtgtcagggggtgcagaacccccagcctgggtgatgtcacggccccttcagtgctgcctttctgggatccagaggagccccctcaggcttcactctcgtgcttcctgctgctgcaaatagcccgggtctcgtgagcctgtgatgcacacagccaggtcttgcgaggcctggaggcctggcaggagaggagtcttctgggagctgggagccctgcccggcctggccgctctgggggccgggcaggcccatgtgtatgtggtttcctgctgagcaggatgcttagggcccaggggctaattgggagcaggtggtggcttggcagaagctgctgagtccaggcggtgatgccggctggccagggctggggtcccaaggatgggcctgggttcagtgattcacgcagtcagtgccttggacacccagggagccactgggccagagggctgagcacgggtgtgggtgaggacagaatggcctgggctgggagcacattaggaatgtccccttagtgagcagggcagggtccgcccttccctgaccacatcaagtacacccactacacggggtttgcttgtcaggatcagccctggagctgggttggaggccttgtcccttgtgacctgaacacctgggtgggccagcagggactgggatgtccctccactccagccctcccatgcctggcttctattctgggtgccaccttctccagggcgaaatcaggggatcaaaggtgagctctgctgtcctgggtgtggccctgggtagagctctcccaccggtctttccccagctgtcctctctgacaccaccccggcctgcctctttgttgccatgagagctgcctacctcttcctgctattcctgcctggtaagtggctcctggggcagggggtagctcctcttatgtggggctgaggagtagggttagtagggggaattcatagtgagcctttgtcacgacttatgaccagaactcagctccccagctcccagggccttctgcctgcttggaccacagactggaccagccaaccctggcagcatctggaggcagctcctggcccttcccccagccttccacagcagcaggcaggcagggttctggagggcacgtcccaggcacaaggactccgtgggcacaaggcacaaggcctctctgggagccgatgtgcaggtgcaggggcacccaaggcagggagtccggatgcttgagttctagatccattcagggcccttctgctctatacagtcctgaccttgtgggggtccctactggccaaatgaagagaatcaatgaggaccacaaaagtcctagcagggccaacattcattcattcagcagcgatgtgttgagtccctaccacgtgccaagtgctgggctaggccctggggattcagcgatgaaccaggcagacacatcgttgctcctcatcatgctgccagtccagggaagggagacaaataggaaacaagcagacatgagaaactccagcatgtgctgagtgctggacagaaatcagcaggagggctggtgggctggaggtggggcggcatcttggcacagctgaaattccagggaagacctgaaggagctgagcaggcctcacaggcccagggagtgtcaggtgcaaaggctctgagggaggcaggagcatgtggagtcctaggagcagccaggaggccagcaacaggaaggggcagggtaaggtcagggaggtgacccatgaccagggtggggaagggtctttaccatcgaagaagagtctggatcctctaggaatctgcttgtggggtcctaggctcttatgggcctgaccttgtgacccccgcctccactctccagaagcgcctcgggcccccgttgcccctcccgatggggtaccctacatgctttgcctccccacagcaggcttgctggctcagggccagtatgacctggacccgctgccgccgttccctgaccacgtccagtacacccactatagcgaccagatcggtaagggccttgccgggtcaccgaggcctggctgctcagatgtgcctggctcagccagggaccgcactggacacgctgatgggaactctgggggttggtccctggctcaggagggaacttgtttgccccaggggctgggggattagccttactcccaccaattccactttcatctttgtttgcagacaacccagactactatgattatcaaggtaacgggctaggggtaggataggacgggccggcagctggggtggggagaccccctgggaggggtagagggagcagacccccttatcctcccctggctgcagaggtgactcctcggccctccgaggaacagttccagttccagtcccagcagcaagtccaacaggaagtcatcccagccccaaccccaggtaggccccagaccctgctcccacccgtctcagctcctgcctcacccctccccaccctgtcaaccctgggagtgggggtctgccagggctgggagaggtgactccccttgccctgaggagacccctcccagtgatgtctgcctacctctgtctccacaccagaaccaggaaatgcagagctggagcccacagagcctgggcctcttggtaagggctttcttgacagctggaaaaatggaggcacgccctgaagttggggtggagtagggggtggtgctggtgggctggaggtctttggcccttgcccatgtgggctcttggcagtgtgggcagtatgactgccgtaggctggcatcaccaggccccccaggcagctccaggaggtcccacctgtccccagtgtgcctggctggaggctaaattggcagcctaggaaggcccctgacctcacagatactgggaggggcagggagtgtgctgggggcttcctgccagccagagagactgagtggtgcacatgtggaggcgaggaagggccagggagtgcaggctggctgagcggtgccctccggctgccctagctgagagcttgaaagaacaaggtgtgtgtgtgcaggagaatccgtgtgctcactctcgtgtgggttggtgtgagcgctcctatgtgggcttctgtgagcgtgggcacgtctgctcgggagttggtatgggcttttgtggcgatgcatgggtgggtgcaaatttctgtttgaacttaggcttctatagtaagtgcggttgtgaattgatacgtgaatattacagccctgggaagtctgacaatgctgcgtgggtctatgtgggcatgtgtaggtatgggtgtctgcacggggcctgaaggtacaggggggactaggccctgtgagccagcctcaggtgggtgaggctgggggccgccccccactctgggctcctagtctgaccccacctgtcaccagactgccgtgaggaacagtacccgtgcacccgcctctactccatacacaggccttgcaaacagtgtctcaacgaggtctgcttctacaggtgagcacagatgggcagctgtcgggaggattccggagcatggggggctagagggcacaggggacagctctggcccgccaaggtgggagttggaggaaagatagtgagtccttaagttgagctcagttctgtggttgagcctgggccagggacctcctccactcctgggctccagtgccaggttctgtccgggctcccgtgccaggttctgtccgggctcccgtgccaggttctgtctgggctatcccagtgggattgggtggaagtggggctgagacctcccgtgccctgtccccgcagcctccgccgtgtgtacgtcattaacaaggagatctgtgttcgtacagtgtgtgcccatgaggagctcctccgaggtaggaaggccacctccccaagacctcccctgtccccacacccgcatcattatctggccacctagccacccacctgatgtttattcaacacatattatccaccaggcccacttccaggacaccctgagctcccctccttgctacttttcatcctcaaaacactcccatcaccagagttgggggaggggcagcggttcccatcacccagctccaccctgaccctgcctccttcctgcccccaatagctgacctctgtcgggacaagttctccaaatgtggcgtgatggccagcagcggcctgtgccaatccgtggcggcctcctgtgccaggagctgtgggagctgctagggtggtgctggcatcctgagtcctggccctcctgggatctggggccctcgggccctgcctgacctggtgcttttttccccatccccatgttccttttattctgtaaaaagttagtggactgcagccctgggggttgcaggctgcggtgcctcaggcccctccttcagcctgtggccacctctggggcacaatgggggctccccactgcccagtctgcccctcgggttgggggagtatcccaggcctctctgtgggacctgggcccctgacgggccttctcagcccgttttgaggacagacagtcccccgaggtaggctacatccccccaccccagctggtctgcttggatttcctacagcccccgtgggcatggaccacctttattttatacaaaattaaaaacaagtttttacaaaagatcaagtcactttttcggtggagagcacagaggggccagccaagtgcccccaacgcggactgtcctgagaggctcctgaccccttggagtgaacgatctgctcaggtgccctgtgcttccgcagtcccagccccaccgccttacccgccggctccagctctgccctgcccagaacgctgcgtcatgacagtgtacgcgcgcatgcgtgttgtgggaattgcacgggagatggaaggcttcagggacacagctttctgatgaccggggctgcttggtgagcacattgagttcccatcaccagaggaacacagcaaaaatgggaggccgcccatggggtggggggggcacagggtcaaggcaggcggactgacatccaaggcctttgtttgggaagttggggagatgggtgccattaagagggcaaaaaaagcggggcacagggactcacacctataattccagcacttagggaggctgaggcgggcggatcacttgaggccaggagttcgagaccagcctggccatggcgaaatcccgtctctagtaaaaatacaaaaaaaaattagccaggcgtggtggcgtgtgcctgtaattccagctactcaggaggccgaggcacaagaattgcttcaatctgggaggcggaggttgcagtgagccgagatcgcgccactgcactccagcctgggcgacagagcaagactgtgtctcaaaaaaaaaagggcaaaaacaagcaagccattgtaacacctccctccaaccagcatgtggggcctgggctctgtgtgtgaaggctcacacactcctgtttagccgtccgaacaggcatatgtggtggatgcaattcatatccccttcttagagacaggaaaactgagcccagagacgttaagtaacccacccaagggtcccacccacgggtccacagctatcagtggcagtgctgtggctgaatcggtcagctggactccagcaggtgaggatgagtgttaatttctccttcggacactgattgagcacctcctatgtgaacttccccagagccaccctatgcggttaggttcccattttacagatgagcaaactgaggctctaagaggttaagcagctttgctcaggatcactcagcggtgccagggcaagaccccacgttcacatccaaacctgcacttgtttgccatgctgcctggaaggcctgtcactgtcccgagggtgggcttggatctaaggaggggccagagaaaggggcaagaaagcataggctggaaggagtcgaggtgcacaggctgggcccagtcccaggcctcaacagccccatctgttccatgggccgggtgaccgagtaccccagaggcctccccatctgacattctgtgaggctggtaagttcccttcccaataccggcctctctgctctccctgccgcctccccaagcacccctccctagagggccccatccctcttgccccagaccctacctgtctccccccgacgtctcctccaattgtctagaaaagggacacagctgtacaaacttttttaaaaacaaggttttgttacaaaaaacagttctgaacagttaacattgtaaaaaggtataaaaatacagggactctgagcactctgaggaatttcccgacacatgctcttaactaaggcggagagatctctgggaagccgaagtcagggcctgggcctctgacccctgccctgggcctggtccccctcctctttcccacgatcccatgctccagggctgaccagagacaagggctctccccaatcctggctacggctcagcctctcaaggaggaactttaatgatctacagtggctcatcctagaagaggggggctggactgcaggtgttgctgggaagcctctccaggcctggagctggagtacccgtcctcagcactgccagcagagcgcctcctcatcccaccccagcttgaggcccccaagggaccgggctctgggtgggggggctgtccaaaagaagggtcctcccctgtcccaggcacaggggtgttctccagatgccagcaggagctcatttctctggggggccggagggtggggagaagggtgctgagctccttcgaagctcctgctgcagctggcccttcagtgtggacacctggggaagaaagggaaggtaaggccagccaggtcctcagcctggcttcagagaaagggaggcagcagggaacccggagggacacagtgccacagtttcaggaaaggtctggtctcactgagagccaggggctgtcctgcctttctcattttgttccttatagcagagtcaggcgtcttctgactgttgggcacctttgagggcaactccacccccattctttatccccatcatcacttgggtgggcgtggcttcagcccagacccaaggggtggacatgtgacccagcccggcctagcagagaagccttgcccggccgacaaggctggctcaggcatggtcaggaaggggtatgtgatctgagcgggccagtgagggacagccttaggacttctgcccctgctctcttctgagatgacagattgctgggagaacctgaggctggagctgctgaggccacctggccacccagggagaaggctaccctgagcatggagccagggggaacagagccatggcaggaggcctggggcccaggagcatcccgtggccccggtctggtcttggctgacaccagcgcagagccaaccccacccttttcggttacgggagccatcgactgcctatacccacaaggtcttgattgggtctctcctctttctgcagccccacacatccatcctggcccagccttctaagggggcctgcacacctgctcctccagcccacgcaccctctggcggtgggcccgctcccgagcctccagggtgcgctcagtctgcgcctgggcgctgcgcagccgctccacctcctgctgcagctccagctgctgctgctgcgcatccacctccagctgggccgggctgtggctctgctccagcaccaccacctgcgcctgcagggaggggctgtggtccgcgttctggcccagtgtgagtgtgtgtgtgcatgtgtgacgggttgtcaggtacctccctgggacacggccagtgcagagggggaaggcaggagagatccttgtgtgtcttccatcctgctggccctgacagtgagcctgcgagcccaggatgagtgcacccaatgacccccactcaggcaggtgcatggacacacacacacacacacacacacacacacacacacacacactcagacatcatacacacaggcacaaaggcaagcatgtaaatacctatctggactcacacaggtgcatgtgtatgtgcaaaggcccaactcccccatgcatgaaaacatctgtacacaaacacatattcataatacctagacacgccacaccatgcacaagattcatgctccatacacaagaatcgtcacatggattctcacactgctgcatggccacaacgtacatgaacccacaggctcacgtgcaaacaggcctttcgtgtcttttctgtacaccttagggagaacccatccctccatggcccgctgggtcactggaaggctcagggctcctgggggagggggttatgggccctgggctggctgggccatcagctccactggaattgctgagcactcatactagggatgaagttggggtcccggactgggtggggtcagacctccagctgctggatctgcctctgcgcctctgccagctccagctcagcccccgtgagggtgcggtccaggcggcccttctctgcgctcagccgcactgtgtcctcatggctacgaagcttctcccgctccacctaggcaggagagccacaggagatcagggtgccaggaggagcttactgagggggctcaggttcctgaaccctgatggaataacctaaccccaccagaggtagcagaccctggggatgtgcagtgggatccaccacggttaggccccagaggaagtgaggggagagcctggggagcagcctaccttgtccagcgtcctcctgagggctacacggtccttctccagccgcagggctgagcgctccacctcccgcttctcagcttccagctgagccagggcgcgctgcaggcttcccaggcgctcctgcagcagccgccgctcgtcttgcagcttctggacggtgttcagggctgcagcctcaccctcctgccgctgccgcagcacctgcaacagaagccaggcaggccccgaatccctctgggcctgagcatacttatctgaagcttggggacaatgaggctggcccactcacagagcaggcgacggtgaggcccacatcagagaattgtcacctgaagccaaacctgtctctctcagtctgtttctccatctgtataacaggactatgctctgaatgaaccatgtttccttactggaggctgcaccagggtttgggatgaggttgagatgggtgggaacgtccccaccctatcctagggcctcacagtcttggggacagagggggcacaccctggccctcacctcccgtagctgttgtagctggccctcggcctccacccgctgcagttccaggtcagccacctcgcctcgcaacgtctgcacctgctcgcccagggagctgctctgcttccgtgcctcagataatgcctgccgggcggcatccagccgttcctgggggacaggggctgatggtgcctggctggcctgggagccctaaggagtcctctctattctgtacctctggacaggtccacagagcataaaacaggcagtcatctcacctggagggtggggtgcacaccaaacccatccacggcctatccactgacctgcataaggtgggacccactcagaccccaactctccccaataaaccctgcccctgggtccccccaagtctataccagtagccttgtcttcttacgggacatacccagagcctcttctccttggctgatggtctactgggcccacgccctcccttcaaagcctgctctcattggctccaactgactgccccattggctggctctctaccagggcccccctccaagcctgctcttactggctgactctctcactgggcccaccccagccagaccctgggcccgagacctggagtacttggcggtcatgttcacaggcggtcagagccttctgcagatgcaggttcttgtcccgggtgctgttgaggctggcactgctctgggccagggcctctgtcaggccccgcaccttgtcccgcagggccccctcgctttcctccaccttagccagggccccattcagccgctccacggtcagctgcagggtccctgccttcacctcgctgtcggccacctggcaggaggacagccagaacaatcggggctgttcccatctggcctctatacctctgctcccactgtgacctccacctggcatgcccaatccacacccttcccacttctctctgggcctccatcattgagacccagtgttcctaagcactcctgctggctcagcctactgccacctgggccccatcccattgctggctaactactagtgcccagagtgccatcaacctagttgtctcagactccctggtctcctccctgtcctcactcctctctcctctctgctgtggaagagaaagggaaaccaccacgaccctaaaatttttttatttttgaccttgttgggtgttcaggcaaggctagccgtattatttaacattccagttagagctgagcttcctagcagtcaaggcaaaaagggaaatgagtgaaacctacatctctaacttgtcccagatgactcctatgtatgcagatgctgtcatcaaatagtcctgaattctaattttggctctgcctcttactagctatgggatcttagacaatgacatcacctctcagcctccatttgtccatctgtgaaatggggatgtgggtaatacttgcctcacagggttgttgggggactgcgtagtgcctacaaagctcttggcacagggcatgtgaacactgtggctgtgatttggggaggggcccacctgtctctgcagggaatccacccgatcctggagggcctgggcttgggcctcgcggtcactgaggcccaggcggctgcgctgcagctccccctcaagcgagcgccgctgcagctccagcttgacagtgcggctctcggaggcgtccagaacctccttcaggcgccgcttgtcgccctccagctttgtctcattggccttcatcttgctgatcttctcctgcaggtggcatggggctcaggcccagacgtccagtgcaccccgcagccctcccgcacacgccctggggcccttagggggaaagtggggagcagcctcgaagggtgacctacgtgacctggggccggcctgggaccctctggggtcctcggtctccccatgcgttcccaggatgagtggacgtgaagatcccagagcccaccttccagttttagcccaggccaatgggctgtggaacccaggactgccccttcgcgccctatggccccatttcatatctgtacagtagggacactggattggtcccagggtaccacaacctgggtgctcacaggagccctgaggaggggctgtagaaatgcagattccaaggcccttctcctgccccactgactcgtgcaaactgagctgagccggacagttctgagggggccctgctgttctagggtttcaggtggtgattccccctcccctgcccagggtcagccagtgaaaaaggcctggggagtggggatgggacaggaaggcagactaggggtcctcccatccctggtactatcctagagacagggtggatcaacagggggtgttattagagcctccccagcccctatcctgagcctggcccctctgccaccctgcccagagccccagccctgccctgtctggggcccccactctggctcctgcccagctttgttcctggcctcctcctgcagcccctgcggctgggcccatggccagggttgaagccgcagacacaacaatccagctaagctcggccccaggccagaggccttgggggcgggggtggtggggggaagcagtaatagagggacaggctggggagggcagaggggagctttggctgcactgtcaccaccagggcctgagtttcctgcccgacagacgcacatacacactggcacacatagctgtcccccaaacacacataaaaaccccagaactacagagacataaaacagaggccccctgagtaccacctgtgataagagcctgtgtgtgtcaccctgtgacgtaatcactgctcctccttttacagattaggaaaatgaaaaccaggcagatgacagcccaaagcccaagctctctttcttttcttcttcttcttcttttttttttcttttcttttttacagggtctcactctgccttgctagagtgcagtggcatgatcacagctcattgcagcctcgacctaccgggctccagtgatcttcccacctcagcctcccgagtagctgggactacaggcccacaccaccatgcccagctaagtatttttcatagagacggggtttcaccatgttgcccaggctggtctcaaactcctgtgctcaagggatccacctgcctcgacctcccaaagtgctaggattacaggcatgagctactgcaccttgaccaagctcttttttctacagcctagtgaccacaagtgacatgagaggatggagtctgaacatggtttcacagagtcacaggctggtcacctcagtgggttgcagagagactcaggcagacagacacagggagacacacataagagttagacactcactcgggtacacagattccccgtcgccccgctggccctcagctcctgcccacctggctggcccggagctcgctctcggtggcctgcaggctcctctccagtgtggccacctggtccagcgtggcccggcgctcccgctcactgcgccgcacactctcctcctgcagcgccagctccgcctggaccccgctcagccgcccatccacactgcgccgggctgtagccaccacccaccccgtcaggcatggccaagcacagccccgagacccaaaccaggtcacaaaatgtccagcctgcactccacccagtgcagggccagactgtctgcacccttcgtagtatgcgggcctgcacacaggtgaggctgtccaaggagggtcctcttggagacagccccgagtcaggtcatgggggccacggcaaggtcagaggccaatcccccggctcctgcctcaactgcccaaaacacaggagagagaacagggaccccgaggatcagactcaccttcctcactctcagccaccgccttctgcagctgcctggccctcgaggttgcgctgtccctctcagcctccatctcggccagctggcgattcagggcactggtctgggtccgaagttcgtcctgtagccccgacatgggggaacaaagacagacccctgctctgacaccctgcaacctccccagggccctccaggttccccatccagccatgcacacccaggcttacccgttctctctgggcactccgcagctcttgcaggaattcccggagggccccgcgcactgcctccgggtccaggtctggagaggctggggaggtggcaggtcctggagatggtggctgggacccagggctgcattctaaggtgctggggctgttgagcccttccccgcttcctagaagagaaagaagacttgctcagtgatgcagaagccacgggcctcccacacatctcactcactgtcatccctgcctttcccaacagccctcagaatcaagcccaacttctctgctatagcttaggggtcttcttgcccatcccagctgaaaccctctcaccctttacaaactggccaccctgcatctcccatgttctagaacattctttgtcccagctccagggcctctgtacatgctgctccccttctccccatggcctctctttgcctggcccatcctttagggccatccctctccctcagaggcctctctggccacaggctggattacagtgagctcatcccaccctcagcggggtctgatgtctgccacccccaccccgaccaggagcaccatgagggctgggcctcgtctcttccatccaccactgttcccagggcccagtgcaagggtggttgctgcatcacctcaagtctctccatactgagtgcccactgtgctaggcacttcatcttcacaacaacttcctgacaggtaaggaacaatttaccctcttcccaggcaaggctggcacaaagcagttaagtgatttgcttgttctgttgactgggtgtggtggctcacacctgtaatcccagcactgtggggtccgaggcaggcggatcacttgaggtcaggagttcaaggcaagcctggccaacatggtaaaaccccgtctctactgaaaatacaaaaattggccaggtgcggtgtctcatgcctgtaatcccagcactctgggaggccaaggcaggtggatcacctgaggtcaggagttcgagaccagcctgccaactagtgaaaccccatctctactaaaaatacaaaaattagctgggcgtggtggcatgcacctgtaatcccagctattcgagaagctgaggttggagaattgcttaaacccgggaagcggagctcgcagtgttcctaatcgaaccgctgcactccagcctgggtaacacagcgagactccgtctcaaaaaaagaagaaagaaaagactgggagcagtggctcacacctgtaatcccagcactttgggatgccgaggtgggcagatcacgaggtcagcagttcgagaccggcctggccaacatggtgaaaacccgtctctactaaaaatacaaaaattaggtgtggtggcgggcgcctgtaatcccagctactcaggaggctgaggcaggagaattgcttgaactgggacctgggaggcagaggttgcagtgagctaagactgcaccattacactccagcctgggcaacagagtgagactcggtcaaaaaaaagaagaaagaagaggaaagaaaagaaaagaaagtaaggaaggaaggaaaagaaaggaaaagaaaagaaaagaaaagagaaaaattagctgagcatggtggcccacgcttatagtcccagctacctgggaggctgaggtctggaggctgaggcaggaaaagcacttgaaccctggagacagaggttgtagtgagctgagactgtgctgcactccagcctgggcaacagagagagactctgtctcaaaaaaaaaaaaaaataaagaaaaaagaaaagaaaagaaaaagaaaaaagtgggcccggcacggtggctcagacctgtaatcccagcactctggtgggaggccgaggcgggcagatcacctgaggtcaggagttcaagaccagcctggccaacatggtgaaacccccatctctactaaaaatacaaaaaattagctgggtgcagtggtgcacgcctgtagtcccagctactcaggaggctgaggcaggagaatcgcttgaacccagcaggcggaggttgcagtgagtcgagatcgcgccattgcactccagcataggcaatagagcgagacttgggctcaaaaaaaaacaaaaacaaagtgatttggttgttctcaatgctgggaagtttcagggctgagatgggaatccaggcagcccgactccctggcagcactcctgcttggagtgatggcccggggaggtggagggggcagggcgggtggaaccagggcactacctggaggctggcactggaactgcaggacacgggtcctgccatgagcatcctgccttggccgcagagggacaccaaaactgctccgcagccatgaacttggtcaccacccaaaaggcctcgctcagaggttcccaaagaagcaggcctgcccctgggggcctccagctctagaaggtcccatcgtctcagggtaaaagtccccgtagaggcctataatgtctattggagcaagcccttcgtccccaaatctcacccccctgcttgatgctctgggactgctggcccctgctgtccacaggacaggcgcacctccactcaggacctccctactcgccccgagtccccctcccagctgctcgctcacgttctccccttacccatcacctcctcagtgaggcacctgctgcccccgcatgaactgccctagcccctaccttggctttgcccaattttttttttttttttttttctgagacggagtttcgctcttgttgcccagtctagagtgcaatggtgcgatctcggctcaccacaacctctgcctcctggtttcaagagattctcctgcctcagcctcccgagtagctgggattacaggcgtctgccaccacacttgactaattttttgtatttttagtagagacagggtttcaccatgttggctaggctggtcttgaactcctggcctcgagtgatccacccgctccggcctcgcagagtgctgggattacaaacatgagccaacgtgtctggccattttcatcatttttaagtgtacaactgagcggcatgaattacattcacactgttgtgcagccatcaccatcatctgttcccagatcatcccgactggaggtcaggagtttgagaccagcctgtccaacatggtgaaaccccatctctcctaaaaaaaaaaaatatacatatatatatatgtatatttatatacacacacacacatacacaaaaattagccaggtgtgccgggcacagtgtctcatgcctttaatcccagcactttgggaggctgaggtgggcagatcacgtaaggtcaggagttcaagactagcctgaccaacatgctgaaatcctgtttttttttttttttttttttttttttgagacggagtctagctctgtcgcccaggctggagtgcagtggcgggatctcagctcactgcaagctccatcttccgggttcacgccattctcctgcctcagcctcccgagtagctgggactacaggtgcctgccactgtgcccagctaattttttttgtatttttagtagagacggggtttcactgtggtctcgatctcctgacctcgtgatccgcccacctctgcctcccaaagtgctgggattacaggcatgagccaccgcgcccagccttgaaaccccgtctctactaaaaatacaaaaattagccaggcgtggtggcacacgcctgtagtctcccagctactcagggggctgaggcaggagaatcacttgaacccaggaggcagaggttgcagtgagccgagatcgtgctactgcactccagcttgggcaacagagcaagacgccatctcaaaaaaaaacaaaaagaataattaaaaacaatacagtgtaacaagtgtaagatttccacttagctgtatttggtatcctaagtaacctagagatgactgaaagtatgtgggagtatatggcaggatggaagctcagaaaatcagataaggagtcaaaggcattaagagccctccagcccccggtccaggaaaggcacggtggctcacgcctgtaatcccagtgggaggatcgcttgagtccaggagttcaagactagcctgggcaatatggcaaaaccccatctctactaaaaacacaaaaattaagcagacattgtagtgcacacctgtagtctcagctacaaaggaggttgaggtgggagaatcacttgagcccaggaggcacaggctgccaaggcagagggagccaagatcacactactgcacttcaactgaggtgacagagtgagatcctgtctcaaaagttgaaaaaaaagaatcaccccacttccccaaaaaaataagtggcctagaccgggtgccgtggctcatgcctctaatcccaaccctgagaggctgagacaggaggatcgcttgaggccaggagtttaagaccagcctgggcaacatagtgagaccccgtctccacaaaaactacaaaaattagctgggcgtggtggcacacctgtagtcccagctactcaggaggctgaggagggaggaccacttgagcccgggaaacagatgaggcctggtctaaagaaaaaagaagcgcccttgagaagcacagatcagtgaagggaggggtctcggtgaggggacggggctaagaagtggacctcagtggagaggtgtggtgggctccttgaaaaaaaacaaaaacaaaaacaaaaacaccctgccatgtgggggcggggcctcagtgcggcccgcccacctccccccttccctgcgcgcggcactgcccttaccttctgcgggtgcgtcccgggcaggggaaccgggcactggccgcggggctgggctgggcgcgcgaccgaggccgaggccccggcgcagagccgagcgcaggccacccagctgggcctccgccgcgcgccgctgcacctccacgcgggccagctcggcctccaggccttgtgcccggccctcggctgcgctcagccgcaggcccagctctgcagcctcggcccgcgccgcctccagcttcagctccaggccgcgggcgtggtccagctgctgcttttcagtgccacgcgcctcctccagggagcccagcaggcgtcgctcgcgggtccggaactcgccttcttgttcctgcagcttccgctgggctacctggagctggagtgatgccaggaggtggaggtcggcaagacctctcccaacccgacgccccacccctaaggcccagactggagcccaccatccctgactgtgtggtcagtacaaccctttctcctttagtgctcgccactcaagcaggcggtgcaaaaacatccccgtgggaggaaatactagaacttgtttattaatctctttattctttatacaagccttgtaatgcccatagtttattagtaataacagctggcatttgaatacatagggcttatcagtgccaggcactaagtaactttccaaaaaatattaactctaattactactctatgaatcgatctcactttacagaagatgaaacaggcacagagatgctaagtaacttgtccaaggccagagttagtaaactgcagagctgggattcaaagccaggcactctagctccaaaggctgttttttttgttgtttttgtgggtttttgtttgtttgtttttggagacagagtctagctctgtcacccaggctggagtgcagtggggcaatctcagctcactgtaacctctgcctcctgggttcaagtgatcctcccacctcagcctccgagtagctgggattacaggtgagcaccaccatgcccagctaatttttgtatttttagtagagacagagttttgccatgttagccagactgctctcgaactcctggcctcaagtgatctgccagcctcggcctcccaaagtgctgggattacaggtgtgagccactgcgcccggctgtttttgtttctgtttttttttttgttttttgtttttaatagcttgacagcagcttattaatcacatgtactcacagccctggggggtgggggaaaggcggggaggcataccacacggggccacacgggggctgtgggctgcacttgagaacacagtgaacagccaggaaggttaagtgcccactggttccaaagggagctgtgtccagaggctgttcccttaaccactaggctacattgccgcccttgcccataatttatcaataaatttgcacacaatgggggcatgcactaaaatatcatttcctgatgggatgcatggtcacacagacacaaagccacccctgccatttagagagtcaacctctcacggtcaccagtttcactggaaacccatctactgagcagctggttgccaggacctgtgccagggcccttcatacatgctcggctgtgctagcccatctctcatgagcgctctgaggcacagagatgacgtgacttggttcaggccacacaacagattcatggcaatgaaacagccggaaaaggcagagcgggtagcctgtgggctttggagtcagacagacttaggtggctgtgtgaccttgggtagatccctcgacctctctgagggctctgtaaaatggggctaatggtaggaagggtgtggtggctcacacctgtaatcccagcactttgggaggccgaggcaggtggatcacctgaggtcaggcgtttgagacaagcctgaccaacatggtgaaatcctgtctctactaaaaatacaaaaaattagctgggcgtggtggcaagcacctgtaatcccagatactcgggaggctgaggcagaagaattgcttgaacccaggaggcggaggttgcagtgagccgagatggtgccagcgcactccagcctgggcgacagagtgagactccatttcaaaataaataactaaataaaaagggctaacagtacctaccccatagggctgctggggaaatcaaacaaggttgtatctacagggcctctccctacccattttgtgccggcacacagtaggcccactgttctttgggttgttgttactacaactggggaagagtctcaaggagtgggggaaggagcaagccctagggagtggcctttcagaatggccccagcattggggtgcccacctgcttcctgctgggggaaggaaagatgcaccagcctgcccgcctgctcagttacctcctgccgcatcacctccaggctggcctcgcccttcagcagcctctgccggaggcccagggtctcccgcctgctctccttctctgcccgctcgcccagcgccaggcggccctgcagctccgccagctcccggcccagtctggtgttctcactgtccagcatcttcatctgtgagagcacgggaatggcagcaggttcagctctgcccctgtaccctcccagttctggcccaaggccacttggtacctactgctgtagggacacatgtatcaaataccaccccacatccactgggagccggcccctacacaaccacactgaacttgggcgatgccaggcacttgggcaccagtggcctgtttaccacttaatcaatgggccaaaactacctttcataaaggggtgggtataatagaaggagggctcagcccttagcagaccaggagttcacaggcaggaaccacagctccctgggttatctttcccctctacgatggcgatgaacgtttttggagcgcttaccatgtgtccagtcctgttctaagcacttcagttatattaactcgtttaatcttggtacaatgctatatgaggtaggtagtaacattatccctatctaacagatgagaaaactgagcctcagagtgtcagagtaacctccccaaagtcacacagcccacacacaccagactgggattcgatctgagacaacggcaatgttctaagcccctatttccccacaggagcagggaggggtactgcctacctcccccatgtgctacagcaggggtaacaggagaggccgtagcatgcaacgcgtccagcaaaagctggcacgcaaatgccagctcctttccgggagtcttgtggtttctcaggaaggggcctgggtgaagggggctgtggtatctctggctatcagagtatcagaatatctctggctatccagttgtgatctctttttttgtaattaaaaacaatttttttaattaaaaaaatttgggggggccaggcatcgtggctcatgcctgtaatcccagcactttgggaggccaaggtgggtggatcacctgacatcaggagttcgagaccagcctggcccacatggtgaaaccctgtctctactaaaaatacaaaaaaattagccaggtgtggtggcgggcatctgtaatcccagctacttgggaggctgagtcaggagaattacttgaacccgggaggcggaggttgcagtgagccgagattgcgccactgcactccagcctgggcaacaagagtgaaactccatctcagaaagtaaataaataaataaaataaaaattaaaagtttaaaaactttttttagagtcagggtcttgctttgtcgcccaggctggagtgcggtgatgcgatcacagctcactgcagccttgacttcctgggctcaagggatactcccacctcagcctcccaagtagctgggactccaggagcgtgtcaccacacctagctattttttaaattttttgtagagactggttctcactatgttgcctgggctggtcttgaactcctaggctcaagcagtcctcccaacttggcctcccaaagcatgagattaaaggcatgagccatcacagctggctaatttttcgtatttttagtagagacaggttttcaccatgttacccaggctggtctcgaactcctgggctcaagcaatccactggcctccgcctcccaaagtgctgagattataggtgtgagccactgcgcctggcctggttgtgatatctctgggtgaggcagcgcctaggggctgaatgaggccatttcctgttctttgcatcttctagagtgagaagcctgaacccacagtgtccaggccagtgcccagtagacagcaggtgcttcttcaatacatgctgctgttgagtttgcagatcatcgaattcacgggtcagcgaactacagctcacaggccaaattcagcccatctcccgtttctacaagggtctgagttaaggatttttttttttttttacatttttaaatcatcgaaaatggatcatttctaaaggaagaacaacatttcttgacacatgaaaatgacagaaaattcacatttcagtgtccctaaacaaagttttactggaacccacacccctctgttcatgcactgtttgggactgctttctcactaccccagcagagtcaagtagttgcaacagagactgtgtggcccgtaaagctggaaatattgaccatttgggctctttacaaaaaaccatttgccaacctctgacctagttcacaaaatctgtaccttttgttgtttgcagattcctttgagaactggacaaggacaccagctcctctccttgcagaaatgtgagcctgagtgtgcacacaaatgcacgcagacttttgcacagtttcagggattcaaggactcctcaaagcccatccattcacaccaaggttaggtgagagggcttgtcatagttcaagcccctggttttacataggggtagaaacgtaattccagaaagggggagctattggcccggggcacacagcaagccccaggctaaggggtggcacagggagagtacctgacgccggagctcctgcagctcccgccgagcctccagccgtgagcgctccacctcctgcagcccagttcgcagctccccggcctccttgcccacagctgtccgtgcctcctctaggagtgccagcttctgctccttgtcctcattggcaagcttcaggctggagagggcagaggtcaggggctgccctgggtcctgggagtagtcagtggctctacacaaaagccgtctcctccaatttctggagtggatcaggcactgcctgcccatgtggcctctctgaagagctaagccctgagccctgcagggctggggcccaggccctcggctgggaggggtagaccagtgactccaggaggggacctggtttccagggtgatgacggtgggtgggtctgagtctggacccaaagctgcccactgcccctctgcccctttccccaatcaacagggaggaaaccttcctaaaatcacccaggtgccaggctctgcttaggagacagaggatccgtatctgggcaatttccccagaacgttgggggtgaagttaggtttcagggatgggatcccatgaggactcaggactggtcctcctgcgacaccccacctgatgcgctcgctctctgccttcttcacagcagaccgaagctcctcattggaacgccgcagggcctcgcgctccttggcaccctcgcccaggctgcgtcgcagctcgcctgcctcctggcgctgcacctcccggccctcctggctctcacgcagcttgcgctgggcctccagcagctcccgccgcagcccgtcacgggcatcctccagcagacgcagctgggtccgaagctcttctgcctgtgagcacagcaggtgtccccagggcagcggtcagggacccccccgtcaagctgggtcttgtaccccagatccctggacccagggagcctgccccatccctctgcagtgctcagaccgcaggctgtgagttatcatttgagcaaggcgtgctgtaatcagtaatgttttgacctgaagtcaccatcaatcaggactgtcctgagcacaacaccaagagggcagagaccccactcacccctccttgaggccaaatcccacctgtacacaacaggtgcttcgtagtgcttgctgcctcctttctaagttgctattcattggtcctcaaatgcagggaggaatcttacactcttctggggccctggggaactaggcccccaggcacacagtgccatttagggtatgctgcttggaagaggggggcggctgctcacctcgcgaagacaggagtcccgctgcttgcccaggtctcgggcctgctcttgcagcctcctcacctcctgggcgtgggccgcagcagcctcctcccgctgggcccgtaggtcccgcagctcagacgtcagagcgttcacggtgctctgggacagaggggctcctcagacttggtcctgctgtgtcccccagccccgggctgctcccaacccgctcagtgcactgtccacttttagctctaaacacggcccctcccgctggcctgccggaccctctgccaacccctggatgcatagtgagtgctgcccgtgtagccagcctctccctcacgccaaaaggattcatcagggcagggctgagccacctccctcagatgggggctcccaaaagaagggctaaacctcctttcccacagcctggaagcttctccaggacagggccatgccgccccgtggtgggggctcctcagccagggatgtgcctctctatgagacagaggcccagctgcccagcctgccctacccggtcctgctcctgccggctctgggcatctcgtttctgccgctccatctccagggagatggtggccaggctgtgccgtgtacccatcaacttctctgacagcgccgtcttctcagactccttcagagacaaggcctgggcagaggcaggggacaaagggcttgggggatgggctggtcctgggggcatgctcaggcttcttgctgcctaggaaatgtgcccactgggggcttagaggcctgagtgtgccactgcaggtggacccagggcagacatgcagccctggaaaagggcacaacggcagtcacaagaatcccggacgtggataccactcatagagctcactaacccgccacagcaccctgactgcagagtctttctttctacccatcttacagatgaggaaactgaggctcaaggaggtaaagtgactcgcccaggtacacagctggtgaggagaggagatgggcacagtctgccctgtctccgttacattataggaaagttagggatttgttatttggggggacacgtcagctgatgcctgtgggcatcgtggggactgctcagaaggcagccatgaggatccatgcccagcgtggggtgggacgaggcatgggagaatatggaacagctttcctggtgtcacgactgtcactgtcactcagtaagtgctcactgtgtgccaggcatggagcacagcaaagcctcacgaacccccttctaatcctcccctcctgcaggtaaggaaactgaggcccccaagagggcagtggcctgccccagggctcctagctgccaagtggcagagcagggcccggccccagaactggagcagctcagagagcagcagaggccatgccagggctcacgaacctgctgcttctcactctctgctaggaggaggccctcgtcgcgctcctgctgcagggcagcaatctcctcactcagctcttccttctcagcctccagccgggccagcagctcctcctgctcacgctgcagctgactctgcagctgggcccgctcggcctccagctcccgccatgctgcctcctagggggccaggaccggatgcctgtgacacaccaggagggggcccaggcagaccccccaaaacatcagggcagcaagagccatctggcccccataccctcagagatggagggtgaccaggtaaatacaagggagtgataagggctatgacggggacacgccagggccgtgaaagtgccaaggagcagcagtgggctggcctgggggtccgaacatggtcccctgcggagggacaagtaactgtcagccaggtaaggagagaaaagaccaccccaggccaagaacacagcccctggaaaggcctagaggatgcagggtgcagaggggaacgggacatggtgagtcacagggccagagccccaggcaggggtggggccaggacaggccgtgtgggccatggggattctaaggacagtgaggggagtgggagagaggactcgagccaaggtgacaaggagcaatctgatttttagcttaggggatgttccgacagctgtggaagagggattggggttgggatggaggggagttaggactggctgtgaggaatgaagggggtcaggggttgccagaggagctggagagaacacagatttggggacattaatgaggccaagccaggcaatgcaaagggcaagaagagcaagggggaggtcacaggagttcagatccctggggactggacaggcgggcaggcagagcccacaggcaaatagcagcccacctggggagcctgagggcaggtgcctgcctcagcacttgcccctagcaactctgtgagaagcagacagagctgccacttctttttttttttttttagacggagtcttgctctgtcacccaggctggagtgcagtggcgagattttggctcactgcaacctctgcctcccaggttgaagcgattcttctgccttaccctcccaagtatctgggactacaggcgcgtgccaccacgcccagctaattttttgtgatttttagtagagatggggtttcactgtgttagccaggatggtctcgatcttccgacctggtgatctgcccacctcggcctcccaaagtgctggattacaggcatgagtcagcacgaccggccaaaccgccccttctttaagatcttcaccgtagctcatgcctgtaatcccagcactttgggaggccgaggtgggcagattacgaggtcaaaagttcgagacaccctgaccaatatggtgaaatcccgtctctactaaaaatgcaaaaattagccaggcgtggtggcgcgcctataatcccagctactcaggaagcagaggcaggagaatcgcttgaacccagaaagtggaggttgcagtgagccgagattgcgccactgcaatccagcctaagcaacagagcaagactccgtctcaaaaaaagaaaaaagaaaaaaaaaaaagagctttaccgccacctcctggagaagcgtggtaacaaccacccaaggccaggggtactgcagggtgagtggcatgccctggagccatgcagtcatagcctgcacctctgtcagaggcagccctgtctaggatttggtggctgagggcccctgtcccgagggccactctggagagcatgtcagtgccagcaatcataacttatggagcatttgctaagtaccagtcactatgctaagccctctatgcagatggtctcagctcatcttcaatacctttcactatcctatccctatttctacaggtggggaaatgaaggcacggacaccttgggtagcatcaccagtaagcgaccaagattcgattcaaacccaggcaattcaaacccagagtcagtgttctagtaacttccctggccccttgcctttctatatgctgaggtctgagtggctcttcatatgcaaacagtacttcttagcaaatgaaagtgctttcctgctgtacattaggtcagtatttcccaaatgtggttgtggaccctctgcatcaggattaccagggctggaccagatttgggacctgggaatctgcatgtctaataagaaccacaacctccccatccccccagtcctcctagctgtccccaggacctccacaacagagaggaagtcccatttcacagatgtagagaccgaggcagagcaagaacgatgatgaaacactggctcagagtcctgcccacccctccccagctgcctgaaccttttcacgctggagtcgctgtaagtcctcctcgtgagctgcccgctgctcccgcagagaggcctgggcctcccgctcagcctgcaccagcttctgggccatcagctccttgtctagactggctttctcctgtgtagctattatttgctgccgcaggcccgccaactcccctgcacgagaggaatgggggaaagggcagggttgggttgaaacttttccttgggccagcagacttaggccaggtgagccacatgggcaaaatcccagaggcagagggcctgcctggcatctagtttgggtcctcttgaagtggcttgccctctctgggcctcagtttccctatatgctacatgggcccactggccctgacccctttcctgcctacctagaatggcattaaaggcataaaatgactgatgagaaggcctcccaaatgggacggatgtcaaacatataacaaccctaggtcaggtgccttggctcacgcctgtaatcccagcactttgggaagctggggcaggtggatcaccttaggtcaggagttcaagaccaacctggccaacatggtgaaaccctgtctctactaaaaatacaacaattagccaggcgtggtggcaggcgtatgtagtcccagcctcagggaggctgaggcaggagaatcgcttgaacccaagaggcagaagttgcagtgagctgagattgcaccactgcactccagcctgggcaacaagagtgagactctgcctcaaaaaaacaaataggccgggcgcagtggctcatgcctgtaatccagcactctgggaggctgggtcaggtaggtcaccttaggtcaggagtttgagaccagcctggccaacacagcgaaaccctgtctataccaaaaatacaaaaattagccaggcatggtggcgggcatatgtagtcccagctacttgggaggctgaggcaggagaatcgcttgaatgcaggaggcagaagttgcagtgagccgagatcgcaccattgcactccagcctgggcaacaagagtgagactctgtctcaaaaaacaaacaggctgggcgtgatggctcatgcctgtaatcccagcagtttgggaggccaaagcgggtggatcacctgaggtcaagagttcgagaccagcttgaccaacatggcgaaaccccgtctctactaaaaatataaaattagccaggcatggtgatgcatgcctgtaatcccagctacttgggaggctgaggcaggagaatcgcttgaacccagaaggcagaggttgaggtgagccgagatagtgccattgcactcccgcctgggcaacaagagtgaaactctgtctcaaaacaaacaaacaaaaaacaaccctattcctgactgagcacttactatgggtcaagcgcccagctaagtattttagacataacctcattttgtcttcataacatgcctatgtagtttatcctcatccccatttaacagatgatgaaatggaggctcagagatcagcagcaacttcccacagctgcacagctacacataaagcatctcctttaatgactgacatgaacatacccgtcaaacgttaactatttatattaatggaaatgactacagggaatggaaatggtatagctaccatctaaaaaccatctcccgggttggaaacccaccagcatttcccttcctggttctgtctggctcaggtgtacatggacaggaaaattaatttccatgacccaagtaggtgcttagttaatgttaggtgagcagaaagaagccctgagttcagagactggatgggaacggtgcagggaagtggggctgggattctggggccaagagagtcatctgaaaagcacagagaactcagactaacaggcctgatgaccgatgaacggcagttactgttgactcagccaggcaccgtgccacggccttacacgcttttcccacgtcatcctggcaacaggcttagaaggtgggcattgccacctccaatcatcagctgaggaatctgcagcccagagaggaaaggggcttgctcaagggaaggtgagatctaagtggtggcacaggactggaacccaggccagccagactcctactccagtgctcccaacttctgtgagaccccagaccttgggaggctgcagtctgggctggaacctggtgttccccccaagtccccagcccctcgtaccagtcagggtctccttggccagcagcagggcctgcccctcggcttccagctgctcccggcgggcctcaagctgggccagctgccgttgcacctcaaacaggctgccctccagggcttccttctccaagctgcagcacatacagtccctgaggccctgggactcagcctccctggccccaggaaactgtggatctcagggagtggccaggcatgggccaagtgccaatctacctgcctggccaggcccacactccctggggaagcctgagccacagctaggacgagtcggcaagccagactccttagtaactgcccctgggggcccgtgcctgcgtgtggctggtcatggtgtggccccaggaggaccccccagggcgggttgggcagagcccaaggccttaccgcaggcgtgtggcctcctctgacagggtcctgccttcacgctccgcagccaccagctgcacagccaggccagcgtgctccttggctagcgcctccttctcacgggccgctcgctccagcgcctccacttgccgctgggcctcccgccgggcctgctccagctcctgctcccgcccgctcagctgccgggagagctggcccccacccagagactgagtagcactcccagcgtcccccagcttgttcatcgtgcagcaccccaactctgggcctaacccagtcctggcagaaggcctgggtttgagcccagggtctgccctgatgtgctacatgtacttgggcaagtcatgaccttctctagatctgcaatgcacgtgtgtacaaaaaccagggcccagccaggtacggtggtgcgtgcctataatcccagcactttggcaggtggatcacttgaggtcaggagttcaagaccagcctggccaacggggtgaaaccctgtctctactaaaaatacaaaaattagccgggcgtggtggtgcacgcctgtagtccctgctacttgggacgctgaggcaggcgaacagcttaaaccctggaggcggaggttgcagtgagcccagatcgtgccactgcattccagcctgggcaacagagcaagactctgtctggaaaaaaaaacaacaacaaaaacaaaacaaaatgaaacaaaaaaaatgagggccctcactcagctctgggagtaacagaacccttgtattactctaaacttgcagagaagctgaatatataaaccagacccaagtgcagctgctcggcaggcctcaaggtggagacctgcaccctgcttcctgcaccccctaccccatcctctagaggcccctcccagaaacctaggcgctccaggatagaccttgcatgaaggtccctggatccctgaaacattaaggtctcttccagatgtgatgttcccaaaagtctaagattccaattctaaaaagtctccacctattattaatctgtatcattattattattattattattattattattattgagacggagtcttgctctgttgcccaggctggagtgcagtggcatgatcttggctcactgcaacctctgcctcctgggttcaagcgattctcctgcctcagcctcccaagtagctgggactacaggcgcgtgccaccacgcccagctaattttttgtagagatagggtttcaccgtgttagccaggatggtcttgatctccggacctcaggtgatccacccgcctcggcctcccaaagtgctgggattataggcgtgagccactgcgcctggctggccccatgttatagatggggcaactgaggtatgggagattgggcagcttgtccaaggtccccagctagcagaagtggggctggatttaacccagaagcaggctccagtgcctgtgacttaacccaggactggatgcagggggctgggagcccggcctgccccacatgctctccacaccacccccacacacagctttgcccacctgcgctagctgctcctgcagctggctgcgctcatggcgcagcgtggggagctgctgctccaatgcctcctgggcctgctccgccactcgtagggagccctccaggccctgccgcgccacctcctgctccaaccgcagctcctctagccgttcctgctcttcccgcgccactgtggcctcctgctctgcctgccgttgccggccctgcagggcggacttttcttcctccagctggaggccaggtaggagtggggcctcgtgagcagggcgtccctcccaggaccaggacgcctcctccacccacccaccagcaacaatagcccaggggaggctcccagggaatgagggacagtgcccttgggtgtatgggacactggggagggggagatgaggagggcccatggaacttctgtgctttgacgcctagaggggatagacagacagacagagaaccagagacagacagagaaccagggacagaaagggaggcaggggccaagacaggtacagggctgggcccggggtgcctcactgagtggggaggatgggtgggcaaggcaggtgggcccgcaggtgcacagcgtacctgggcgacaaggcggttcagatccaacttgtcctgagcaaggctctcgttgagggcgctcagcttggacagggagtcctgcagggaggcctcctctgccctcagcttggtcatggagagctcgagctccacgcggccagcctcagcctgcagggtcaggccccgagaaatgaggaaaggcagaaaggtcgggaggaggtgaggaggcccaagaagagacccagagagatggaccctcagagacagggtaggggagacaaggaggggacacagtgtgagatggaaaaaaaaaaatcaccgcagaaagcctgctgcttatgagccatttaaaagccacacaccacagagctgtgcaaaaatagctcaagctgcagggcagggccagagttcagaggatcccctgagtagggtctagggatagcactgctcagagcccaggctgcagcggacagcgcaggcccccctgccaaggaccctctgcgctgtggccacaactctcagaccccaggagctgagtctcaggcactggatgaccctgagctataggcattgcccccaggagcatccagaagagcagggatacggccataaagagaggtcagtccacttatggctgggaccagaggtccagaggtctgtggcctgtgacaaagatcagcctgtatccagaaggaaggggtcagtctgtgaccaggctcagaggtctgcctgacactgggaccagtctgtgccagagtgacaaggcttggggctgggggtcagaggtaggtttgtggttgtgcagcagacagggacccaccttggtcagcgcctcggccacctcggccttctcggcctgcagcatgtcccgttgcagtgtggcgcggctcagcgcctccctcacctccaccagctccttggccaggactgagcgcttcccttccagctgctctagttgtctatggctgtgggacaaagggtgggtgggtggcccatgtcactttcctgccccgaacctcctgtagccagcgagatgctgggctggggaccaggcctgaggcaggagtttggagagaaacagcctgagccacagggcaaccaagcccactaccgcttagctccatgaccctgggcctccgttttcacatctgcaaaatgaggtaacacttacctcgtgacattgtttgtttttttgagacacagtcttgctctgtcacacaggctggagtacagtggtgcgatcctggctgactgcaacctctgcctcccaggttcaagcaattctcctgcctcagcctcccgagtagctgggattacaggtgctcaccaccacgcctgactaatttttgtagttttagtagagacgggatttctccacgttggtcaggctggtctggaactcctgacctcaggcgatctgcctgccttggcctctcaaagtgctgggattacaggcgtgagccactgcgcccggcctgttttaaggatacaaacttcacatgtgcttaaaatagtgcctgacacatctccccaaggaccttcagaaacaagaataacatgctccaccacagtctactaaacatcatcatcgatcacgtccctgagaggtaagcagcgcagtggtgaagaggttaactctgaaggcagaatgtctgggttcaaatcctggctcttctgctaactgtgtgacctggggcaagtgacatggcttctctgtgcctcagtttaccatccacaaaatggagataaccgcttctatgtcacagagttatcatggagttaaatgagagaactgaattgcttaaaatggtatctggcacttagtgaaattagtaaggatattattattcttctaactaaatttttaaaatactactgctaatattactactgttattttaattattcttgttattatcatccaagttctaccttttaactagttctctgactccaggtaagtgactatacctccctgagccccagtttcctgaaatgggtctggttagaaaacccgacatcggaggggtccagacggtaggaggcccaggacccagtgggtgtcacctaaccccaggggggcactgtcaggggacccgaggcacatctgaagggtcctggcagggtggcgagatgctgctcacctgcgctcaagctcccggcgcacccgcgcgccatcctgcactgcgtcctcctgctcttcctccagccggtcccgctggcgccgcagctcctcctgggcagcctgcagcttctcccgctcctgccgcagctcctcggcctgctgctgggccacctgcaggctgtgggccaggttgctcttctcccttcaggacaaggggagggggagcagaggggatgctggggctgctctctgcagggaaggtggctggctgctcctctagccatgagctacatcctccagtcttccaaggcacctgcctccaggaagccttccctgaccaccctgtccatggctgactcatttcactcacacactccagcagaagaacctggctttccttctctccagtccgcccacttggagtggatggaggtgctggtgtgatctccaagcaccctaccaggtagaagaggccgagctaggctcctgggacacacggcaattgtgccaccagctctgctaggccatgtgaccaggaaatgtcccctataacaccccatgcccctcaattctgggaagcctgatagagctgagtctgcagatcccacagcttcctgctacacaggcacatggtggccacggcaggggagggaggagaagggaacaactgggaccccaaagacttgccatgagctgccacgttccccactggccataggtgcgaaaaaacttcacagcgtgattttgttttattttttttttttgagacggagtctcgctctgtcccccaggctggagtgcagtagcgcaatctccactcactgcaagctccgcctcccgggttcacgccattctcctgcctcagcctcccaagtagctgggaatacaggcgcccgccaccatgtccgggtaatttgttgtatttttagtagagatgggggtttcactgtgttagccaggatggtctcaatcttctgacctcatgacctgcccgcctcggcctcccaaagtgctgggattacaggcatgagccaatgcgcccagtaatttttttttttttttagacggcatctcactctgtcgcccaggctggagtgcagtgcacgatctcggcttgctgcaacctccacctccagagttcaagcgattctcctgcctcagcctcccaagtagctgggattacagccatgtgccaccacggatggctaattttgtatttttagtagagacagggtttctccatgttggtcaggctggtctcgaactcccgacctcaggtggtcctcctgcctcggcctcccaaagtgctgggattacaggagtgagccactgtgcccggccaatttttttttatttttagtagagatggggtttcgccatgttggccaggctggtctcaaactcctgacctcaagtgatccacccgccttggcctcccaaaatactgggattacaggtgtgagccacctcgctcagtcgacaatgtgctgttaagtaaaaatagcagaatgcaaaatgggatgtttgctgtgaacacaactgcttaaaaagaccttctcctttccaggcatggaaagcttgggtttactctcacatggacctgaattccagttcccaccctgccacccccagccacacacgctgtatgagtctgagccagtctctcaagcttacaacaacagagttccgaattgcatgagtttgacaggaagactaaatcacagagtacatacaaaacactcggccaagagcctggcacacagtaggtgtgcaggaaacgtttgctatctcactgccaggcaacacaatgggaaggaaaaccagtgccctaaatgaattaggatgggcagatgaggctgtgagaaggcgctgtctttttattcctatttttcaaacttttcattagatggttacatttatgaagagaaaaaccaaacaacaaaatatcaaaaacaacctggcagctaagaagtggataatttcttgtcttaaaaatcttcagggtgcctggcgtgatggctcacacctataatcccagtactttgggaggccgagacgggctcaggagttagagatcagcctgggcaacatggcgaaaccctatctctacaaaaaacagaaaaattaggcaggcgtggtggtgtgtgcctgtagttccagctactcaggaggctgagatggaaggatcacttaagcctaggaggtggaggttgcagtgaaatgagatcgcaccactgcactccagactgggtgacataacaagaccctgtctcaaattaagagaaaaaaaaaatcttcaaggctaggcatggtggcttatgcctctaatcccagcatttttggaggccgaggcaggggaatcacttgaggccaggagtttgagaccatcctgggcaacacagcaagaccccatctctaaaaaaaactccaagaaatacagtccaaaatagtgctggcaatagaactcgctgagatgacagaaatgttctatggccatgtatggttgatgagtgcttgaaatgtggctagggcaactaaagaactgaattttttcttttttttttttttttgagacggagtcttgctctgtcgctcaggctggagtgcagtggcgccatctcggctcgctgccagctccgcctcccgggttcaggccattctcctgcctcagtcttccaagtagctgggactataggtgcctgccaccacgcccagctaatttactttttgtatttttagtagagacggggtttcactgtgttagccaggatggtctcaatctcctgacctcatgatccgcccgccttggccttccaaagtgctgagattacaggtgtgagccaccgggcccagcattattattattattttttttttgagatggagtctcgctctatctcccagcctggagtgcagtggcacgatcctggctcattgcaacctctgcctccggggttcaagtgattctcccacctcagcctcctgaatagctgggattacaggagcatgccaccatgcctggttaatttttgtatttttagtagaaacagggtttcaccatgttggccagcaagctgggtgtgagccaccacacccagcctgaattttcactttttaaaaattttaattaaattttaatagagccaggcacagtggcttatgcctgtaatcccagcaatttgggaggctgaggtgggaggagtgattgaagctaggagttcaagaccagcatgggcaacatagtgagacccccatctctacaaaaaatttagaaatgttggcggcttgtctactatcctcgaggctgagatc

SEQ ID NO: 27 - DNA, 1286 bp, human
ggagcgcgcggtccgggcacacggagcaggttgggaccgcggcgggtaccggggccggggcgccatgcggaggccgagcgtgcgcgcggccgggctggtcctgtgcaccctgtgttacctgctggtgggcgctgctgtcttcgacgcgctcgagtccgaggcggaaagcggccgccagcgactgctggtccagaagcggggcgctctccggaggaagttcggcttctcggccgaggactaccgcgagctggagcgcctggcgctccaggctgagccccaccgcgccggccgccagtggaagttccccggctccttctacttcgccatcaccgtcatcactaccatcgggtacggccacgccgcgccgggtacggactccggcaaggtcttctgcatgttctacgcgctcctgggcatcccgctgacgctggtcactttccagagcctgggcgaacggctgaacgcggtggtgcggcgcctcctgttggcggccaagtgctgcctgggcctgcggtggacgtgcgtgtccacggagaacctggtggtggccgggctgctggcgtgtgccgccaccctggccctcggggccgtcgccttctcgcacttcgagggctggaccttcttccacgcctactactactgcttcatcaccctcaccaccatcggcttcggcgacttcgtggcactgcagagcggcgaggcgctgcagaggaagctcccctacgtggccttcagcttcctctacatcctcctggggctcacggtcattggcgccttcctcaacctggtggtcctgcgcttcctcgttgccagcgccgactggcccgagcgcgctgcccgcccccccagcccgcgccccccgggggcgcccgagagccgtggcctctggctgccccgccgcccggcccgctccgtgggctccgcctctgtcttctgccacgtgcacaagctggagaggtgcgcccgcgacaacctgggcttttcgcccccctcgagcccgggggtcgtgcgtggcgggcaggctcccaggcctggggcccggtggaagtccatctgacaaccccacccaggccagggtcgaatctggaatgggagggtctggcttcagctatcagggcaccctccccagggattggaaacggatgacgggcctctaggcggtcttctgcacgagcaagtttctcattactgtctgtggctaagtcccctcccttctttccaaaaatatattacagtcaccccataaaaaaaaaaaaaaaaaaaaaaaaaaaaaaaaaaaaaaaaaa

SEQ ID NO: 28 - DNA, 1210 bp, human
gggcccgttgaggcggagctcagttcccggccaggacacggtctgggccgccgaatctccggccgaagagcggcggcggcagggcgggaaaaaaatgaagaatgaaattgctgccgttgtcttctttttcacaaggctagttcgaaaacatgataagttgaaaaaagaggcagttgagaggtttgctgagaaattgaccctaatacttcaaggaaaatataaaaacccttggtatccagaaaaaccatcgaaaggacaggcctacagatgtattcgtgtcaataaatttcagagagttgatcctgatgtcctgaaagcctgtgaaaacagctgcatcttgtatagtgacctgggcttgccaaaggagctcactctctgggtggacccatgtgaggtgtgctgtcggtatggagagaaaaacaatgcattcattgttgccagctttgaaaataaagatgagaacaaggatgagatctccaggaaagttaccagggcccttgataaggttacctctgattatcattcaggatcctcttcttcagatgaagaaacaagtaaggaaatggaagtgaaacccagttcggtgactgcagccgcaagtcctgtgtaccagatttcagaacttatatttccacctcttccaatgtggcaccctttgcccagaaaaaagccaggaatgtatcgagggaatggccatcagaatcactatcctcctcctgttccatttggttatccaaatcagggaagaaaaaataaaccatatcgcccaattccagtgacatgggtacctcctcctggaatgcattgtgaccggaatcactggattaatcctcacatgttagcacctcactaacttcgtttttgattgtgttggtgtcatgttgagaaaaaggtagaataaaccttactacacattaaaagttaaaagttcttactaatagtagtgaagttagatgggccaaaccatcaaacttatttttatagaagttattgagaataatctttcttaaaaaatatatgcactttagatattgatatagtttgagaaattttattaaagttagtcaagtgccgaagtttttaatattggacttgagtatttatatattgtgcatcaactctgttggatacgagaacactgtagaagtggacgatttgttctagcacctttgagaatttactttatggagcgtatgtaagttatttatat

SEQ ID NO: 29 - DNA, 1412 bp, human
cggggtcgtccgcaaagcctgagtcctgtcctttctctctccccggacagcatgagcttcaccactcgctccaccttctccaccaactaccggtccctgggctctgtccaggcgcccagctacggcgcccggccggtcagcagcgcggccagcgtctatgcaggcgctgggggctctggttcccggatctccgtgtcccgctccaccagcttcaggggcggcatggggtccgggggcctggccaccgggatagccgggggtctggcaggaatgggaggcatccagaacgagaaggagaccatgcaaagcctgaacgaccgcctggcctcttacctggacagagtgaggagcctggagaccgagaaccggaggctggagagcaaaatccgggagcacttggagaagaagggaccccaggtcagagactggagccattacttcaagatcatcgaggacctgagggctcagatcttcgcaaatactgtggacaatgcccgcatcgttctgcagattgacaatgcccgtcttgctgctgatgactttagagtcaagtatgagacagagctggccatgcgccagtctgtggagaacgacatccatgggctccgcaaggtcattgatgacaccaatatcacacgactgcagctggagacagagatcgaggctctcaaggaggagctgctcttcatgaagaagaaccacgaagaggaagtaaaaggcctacaagcccagattgccagctctgggttgaccgtggaggtagatgcccccaaatctcaggacctcgccaagatcatggcagacatccgggcccaatatgacgagctggctcggaagaaccgagaggagctagacaagtactggtctcagcagattgaggagagcaccacagtggtcaccacacagtctgctgaggttggagctgctgagacgacgctcacagagctgagacgtacagtccagtccttggagatcgacctggactccatgagaaatctgaaggccagcttggagaacagcctgagggaggtggaggcccgctacgccctacagatggagcagctcaacgggatcctgctgcaccttgagtcagagctggcacagacccgggcagagggacagcgccaggcccaggagtatgaggccctgctgaacatcaaggtcaagctggaggctgagatcgccacctaccgccgcctgctggaagatggcgaggactttaatcttggtgatgccttggacagcagcaactccatgcaaaccatccaaaagaccaccacccgccggatagtggatggcaaagtggtgtctgagaccaatgacaccaaagttctgaggcattaagccagcagaagcagggtaccctttggggagcaggaggccaataaaaagttcagagttcattggatgtc

SEQ ID NO: 30 - DNA, 846 bp, human
ccacgtccggggtgccgagccaactttcctgcgtccatgcagccccgccggcaacggctgcccgctccctggtccgggcccaggggcccgcgccccaccgccccgctgctcgcgctgctgctgttgctcgccccggtggcggcgcccgcggggtccgggggccccgacgaccctgggcagcctcaggatgctggggtcccgcgcaggctcctgcagcagaaggcgcgcgcggcgcttcacttcttcaacttccggtccggctcgcccagcgcgctgcgagtgctggccgaggtgcaggagggccgcgcgtggattaatccaaaagagggatgtaaagttcacgtggtcttcagcacagagcgctacaacccagagtctttacttcaggaaggtgagggacgtttggggaaatgttctgctcgagtgtttttcaagaatcagaaacccagaccaaccatcaatgtaacttgtacacggctcatcgagaaaaagaaaagacaacaagaggattacctgctttacaagcaaatgaagcaactgaaaaaccccttggaaatagtcagcatacctgataatcatggacatattgatccctctctgagactcatctgggatttggctttccttggaagctcttacgtgatgtgggaaatgacaacacaggtgtcacactactacttggcacagctcactagtgtgaggcagtgggtaagaaaaacctgaaaattaacttgtgccacaagagttacaatcaaagtggtctccttagactgaattcatgtgaacttctaatttcatatcaagagttgtaatcacatttatttcaataaatatgtgagttcctgc

SEQ ID NO: 31 - DNA, 1264 bp, human
ttgagactcgagtgaccaggtggaggagaggcaactttccctgtcgggcttgagttgggagaggagcagggcggccttgtagggacccgtccctgctcctgaccatcaccgtcactggggtcactgtgctcgtgttggtcctgaagagcatgaactccaggaggagagagccaatcaccttacaggaccctgaagccaagtacccgctgccattgattgagaaagagaaaatcagccacaacacccggaggttccgctttggactgccttcgccggaccatgtcttagggcttcctgtaggtaactatgtccagctcttggcaaaaatcgataatgaattggtggtcagggcttacacccctgtctccagtgatgatgacagaggctttgtggacctaattataaagatctacttcaaaaatgtacacccccaatatcctgaaggtgggaagatgactcagtatttggagaacatgaaaatcggggagaccatcttttttcgaggcccaaggggacgcttgttttaccatgggccacggaatcttggaatcagaccagaccagacgagtgagcctaaaaaaacactggccgatcacctgggaatgattgctgggggcacaggcatcacacccatgttgcagctcattcgccacatcaccaaggaccccagtgacaggaccaggatgtccctcatctttgccaaccagacagaggaggatatcttggtcagaaaagagcttgaagaaattgccaggactcacccagaccagttcgacctgtggtacaccctggacaggcctcccattggctggaagtacagctcaggcttcgttactgccgacatgatcaaggagcaccttcctcctccagcgaagtccacgctcatcctggtgtgtggcccgccaacactgatccagacggcggctcaccctaacctggagaagctgggttatacccaggacatgattttcacctactaacaaacacctccatgtgctcagcaaatttgcatgtcccttttcatctgtttcagagtaagttcaatttcaccacggtaaactgggatgttttcaaaagtgccttgccatgtaccttcgcgcacacactggttctcctcttttgggtgtgggcctaacaaaaagggctcaaggggctggagactggctgctggggcctccttgcttggaggctggcaagagctccatttcagtatctttctccgtggttttgtgaaataaactcaagtacaaagcaaaaaaaaaaa

SEQ ID NO: 32 - DNA, 10096 bp, human
ggagaagcgggcgaattgggcaccggtggcggctgcgggcagtttgaattagactctgggctccagcccgccgaagccgcgccagaactgtactctccgagaggtcgttttcccgtccccgagagcaagtttatttacaaatgttggagtaataaagaaggcagaacaaaatgagctgggctttggaagaatggaaagaagggctgcctacaagaactcttcagaaaattcaagagcttgaaggacagcttgacaaactgaagaaggaaaagcagcaaaggcagtttcagcttgacagtctcgaggctgcgccgcagaagcaaacacagaaggttgaaaatgaaaaaaccgagggtacaaacctgaaaagggagaatcaaagattgatggaaatatgtgaaagtctggagaaaactaagcagaagatttctcatgaacttcaagtcaaggagtcacaagtgaatttccaggaaggacaactgaattcaggcaaaaaacaaatagaaaaactggaacaggaacttaaaaggtgtaaatctgagcttgaaagaagccaacaagctgcgcagtctgcagatgtctctctgaatccatgcaatacaccacaaaaaatttttacaactccactaacaccaagtcaatattatagtggttccaagtatgaagatctaaaagaaaaatataataaagaggttgaagaacgaaaaagattagaggcagaggttaaagccttgcaggctaaaaaagcaagccagactcttccacaagccaccatgaatcaccgcgacattgcccggcatcaggcttcatcatctgtgttctcatggcagcaagagaagaccccaagtcatctttcatctaattctcaaagaactccaattaggagagatttctctgcatcttacttttctggggaactagaggtgactccaagtcgatcaactttgcaaatagggaaaagagatgctaatagcagtttctttggcaattctagcagtcctcatcttttggatcaattaaaagcgcagaatcaagagctaagaaacaagattaatgagttggaactacgcctgcaaggacatgaaaaagaaatgaaaggccaagtgaataagtttcaagaactccaactccaactggagaaagcaaaagtggaattaattgaaaaagagaaagttttgaacaaatgtagggatgaactagtgagaacaacagcacaatacgaccaggcgtcaaccaagtatactgcattggaacaaaaactgaaaaaattgacggaagatttgagttgtcagcgacaaaatgcagaaagtgccagatgttctctggaacagaaaattaaggaaaaagaaaaggagtttcaagaggagctctcccgtcaacagcgttctttccaaacactggaccaggagtgcatccagatgaaggccagactcacccaggagttacagcaagccaagaatatgcacaacgtcctgcaggctgaactggataaactcacatcagtaaagcaacagctagaaaacaatttggaagagtttaagcaaaagttgtgcagagctgaacaggcgttccaggcgagtcagatcaaggagaatgagctgaggagaagcatggaggaaatgaagaaggaaaacaacctccttaagagtcactctgagcaaaaggccagagaagtctgccacctggaggcagaactcaagaacatcaaacagtgtttaaatcagagccagaattttgcagaagaaatgaaagcgaagaatacctctcaggaaaccatgttaagagatcttcaagaaaaaataaatcagcaagaaaactccttgactttagaaaaactgaagcttgctgtggctgatctggaaaagcagcgagattgttctcaagaccttttgaagaaaagagaacatcacattgaacaacttaatgataagttaagcaagacagagaaagagtccaaagccttgctgagtgctttagagttaaaaaagaaagaatatgaagaattgaaagaagagaaaactctgttttcttgttggaaaagtgaaaacgaaaaacttttaactcagatggaatcagaaaaggaaaacttgcagagtaaaattaatcacttggaaacttgtctgaagacacagcaaataaaaagtcatgaatacaacgagagagtaagaacgctggagatggacagagaaaacctaagtgtcgagatcagaaaccttcacaacgtgttagacagtaagtcagtggaggtagagacccagaaactagcttatatggagctacagcagaaagctgagttctcagatcagaaacatcagaaggaaatagaaaatatgtgtttgaagacttctcagcttactgggcaagttgaagatctagaacacaagcttcagttactgtcaaatgaaataatggacaaagaccggtgttaccaagacttgcatgccgaatatgagagcctcagggatctgctaaaatccaaagatgcttctctggtgacaaatgaagatcatcagagaagtcttttggcttttgatcagcagcctgccatgcatcattcctttgcaaatataattggagaacaaggaagcatgccttcagagaggagtgaatgtcgtttagaagcagaccaaagtccgaaaaattctgccatcctacaaaatagagttgattcacttgaattttcattagagtctcaaaaacagatgaactcagacctgcaaaagcagtgtgaagagttggtgcaaatcaaaggagaaatagaagaaaatctcatgaaagcagaacagatgcatcaaagttttgtggctgaaacaagtcagcgcattagtaagttacaggaagacacttctgctcaccagaatgttgttgctgaaaccttaagtgcccttgagaacaaggaaaaagagctgcaacttttaaatgataaggtagaaactgagcaggcagagattcaagaattaaaaaagagcaaccatctacttgaagactctctaaaggagctacaacttttatccgaaaccctaagcttggagaagaaagaaatgagttccatcatttctttaaataaaagggaaattgaagagctgacccaagagaatgggactcttaaggaaattaatgcatccttaaatcaagagaagatgaacttaatccagaaaagtgagagttttgcaaactatatagatgaaagggagaaaagcatttcagagttatctgatcagtacaagcaagaaaaacttattttactacaaagatgtgaagaaaccggaaatgcatatgaggatcttagtcaaaaatacaaagcagcacaggaaaagaattctaaattagaatgcttgctaaatgaatgcactagtctttgtgaaaataggaaaaatgagttggaacagctaaaggaagcatttgcaaaggaacaccaagaattcttaacaaaattagcatttgctgaagaaagaaatcagaatctgatgctagagttggagacagtgcagcaagctctgagatctgagatgacagataaccaaaacaattctaagagcgaggctggtggtttaaagcaagaaatcatgactttaaaggaagaacaaaacaaaatgcaaaaggaagttaatgacttattacaagagaatgaacagctgatgaaggtaatgaagactaaacatgaatgtcaaaatctagaatcagaaccaattaggaactctgtgaaagaaagagagagtgagagaaatcaatgtaattttaaacctcagatggatcttgaagttaaagaaatttctctagatagttataatgcgcagttggtgcaattagaagctatgctaagaaataaggaattaaaacttcaggaaagtgagaaggagaaggagtgcctgcagcatgaattacagacaattagaggagatcttgaaaccagcaatttgcaagacatgcagtcacaagaaattagtggccttaaagactgtgaaatagatgcggaagaaaagtatatttcagggcctcatgagttgtcaacaagtcaaaacgacaatgcacaccttcagtgctctctgcaaacaacaatgaacaagctgaatgagctagagaaaatatgtgaaatactgcaggctgaaaagtatgaactcgtaactgagctgaatgattcaaggtcagaatgtatcacagcaactaggaaaatggcagaagaggtagggaaactactaaatgaagttaaaatattaaatgatgacagtggtcttctccatggtgagttagtggaagacataccaggaggtgaatttggtgaacaaccaaatgaacagcaccctgtgtctttggctccattggacgagagtaattcctacgagcacttgacattgtcagacaaagaagttcaaatgcactttgccgaattgcaagagaaattcttatctttacaaagtgaacacaaaattttacatgatcagcactgtcagatgagctctaaaatgtcagagctgcagacctatgttgactcattaaaggccgaaaatttggtcttgtcaacgaatctgagaaactttcaaggtgacttggtgaaggagatgcagctgggcttggaggaggggctcgttccatccctgtcatcctcttgtgtgcctgacagctctagtcttagcagtttgggagactcctccttttacagagctcttttagaacagacaggagatatgtctcttttgagtaatttagaaggggctgtttcagcaaaccagtgcagtgtagatgaagtattttgcagcagtctgcagacctatgttgactcattaaaggccgaaaatttggtcttgtcaacgaatctgagaaactttcaaggtgacttggtgaaggagatgcagctgggcttggaggaggggctcgttccatccctgtcatcctcttgtgtgcctgacagctctagtcttagcagtttgggagactcctccttttacagagctcttttagaacagacaggagatatgtctcttttgagtaatttagaaggggttgtttcagcaaaccagtgcagtgtagatgaagtattttgcagcagtctgcaggaggagaatctgaccaggaaagaaaccccttcggccccagcgaagggtgttgaagagcttgagtccctctgtgaggtgtaccggcagtccctcgagaagctagaagagaaaatggaaagtcaagggattatgaaaaataaggaaattcaagagctcgagcagttattaagttctgaaaggcaagagcttgactgccttaggaagcagtatttgtcagaaaatgaacagtggcaacagaagctgacaagcgtgactctggagatggagtccaagttggcggcagaaaagaaacagacggaacaactgtcacttgagctggaagtagcacgactccagctacaaggtctggacttaagttctcggtctttgcttggcatcgacacagaagatgctattcaaggccgaaatgagagctgtgacatatcaaaagaacatacttcagaaactacagaaagaacaccaaagcatgatgttcatcagatttgtgataaagatgctcagcaggacctcaatctagacattgagaaaataactgagactggtgcagtgaaacccacaggagagtgctctggggaacagtccccagataccaattatgagcctccaggggaagataaaacccagggctcttcagaatgcatttctgaattgtcattttctggtcctaatgctttggtacctatggatttcctggggaatcaggaagatatccataatcttcaactgcgggtaaaagagacatcaaatgagaatttgagattacttcatgtgatagaggaccgtgacagaaaagttgaaagtttgctaaatgaaatgaaagaattagactcaaaactccatttacaggaggtacaactaatgaccaaaattgaagcatgcatagaattggaaaaaatagttggggaacttaagaaagaaaactcagatttaagtgaaaaattggaatatttttcttgtgatcaccaggagttactccagagagtagaaacttctgaaggcctcaattctgatttagaaatgcatgcagataaatcatcacgtgaagatattggagataatgtggccaaggtgaatgacagctggaaggagagatttcttgatgtggaaaatgagctgagtaggatcagatcggagaaagctagcattgagcatgaagccctctacctggaggctgacttagaggtagttcaaacagagaagctatgtttagaaaaagacaatgaaaataagcagaaggttattgtctgccttgaagaagaactctcagtggtcacaagtgagagaaaccagcttcgtggagaattagatactatgtcaaaaaaaaccacggcactggatcagttgtctgaaaaaatgaaggagaaaacacaagagcttgagtctcatcaaagtgagtgtctccattgcattcaggtggcagaggcagaggtgaaggaaaagacggaactccttcagactttgtcctctgatgtgagtgagctgttaaaagacaaaactcatctccaggaaaagctgcagagtttggaaaaggactcacaggcactgtctttgacaaaatgtgagctggaaaaccaaattgcacaactgaataaagagaaagaattgcttgtcaaggaatctgaaagcctgcaggccagactgagtgaatcagattatgaaaagctgaatgtctccaaggccttggaggccgcactggtggagaaaggtgagttcgcattgaggctgagctcaacacaggaggaagtgcatcagctgagaagaggcatcgagaaactgagagttcgcattgaggccgatgaaaagaagcagctgcacatcgcagagaaactgaaagaacgcgagcgggagaatgattcacttaaggataaagttgagaaccttgaaagggaattgcagatgtcagaagaaaaccaggagctagtgattcttgatgccgagaattccaaagcagaagtagagactctaaaaacacaaatagaagagatggccagaagcctgaaagtttttgaattagaccttgtcacgttaaggtctgaaaaagaaaatctgacaaaacaaatacaagaaaaacaaggtcagttgtcagaactagacaagttactctcttcatttaaaagtctgttagaagaaaaggagcaagcagagatacagatcaaagaagaatctaaaactgcagtggagatgcttcagaatcagttaaaggagctaaatgaggcagtagcagccttgtgtggtgaccaagaaattatgaaggccacagaacagagtctagacccaccaatagaggaagagcatcagctgagaaatagcattgaaaagctgagagcccgcctagaagctgatgaaaagaagcagctctgtgtcttacaacaactgaaggaaagtgagcatcatgcagatttacttaagggtagagtggagaaccttgaaagagagctagagatagccaggacaaaccaagagcatgcagctcttgaggcagagaattccaaaggagaggtagagaccctaaaagcaaaaatagaagggatgacccaaagtctgagaggtctggaattagatgttgttactataaggtcagaaaaagaagatctgacaaatgaattacaaaaagagcaagagcgaatatctgaattagaaataataaattcatcatttgaaaatattttgcaagaaaaagagcaagagaaagtacagatgaaagaaaaatcaagcactgccatggagatgcttcaaacacaattaaaagagctcaatgagagagtggcagccctgcataatgaccaagaagcctgtaaggccaaagagcagaatcttagtagtcaagtagagtgtcttgaacttgagaaggctcagttgctacaaggccttgatgaggccaaaaataattatattgttttgcaatcttcagtgaatggcctcattcaagaagtagaagatggcaagcagaaactggagaagaaggatgaagaaatcagtagactgaaaaatcaaattcaagaccaagagcagcttgtctctaaactgtcccaggtggaaggagagcaccaactttggaaggagcaaaacttagaactgagaaatctgacagtggaattggagcagaagatccaagtgctacaatccaaaaatgcctctttgcaggacacattagaagtgctgcagagttcttacaagaatctagagaatgagcttgaattgacaaaaatggacaaaatgtcctttgttgaaaaagtaaacaaaatgactgcaaaggaaactgagctgcagagggaaatgcatgagatggcacagaaaacagcagagctgcaagaagaactcagtggagagaaaaataggctagctggagagttgcagttactgttggaagaaataaagagcagcaaagatcaattgaaggagctcacactagaaaatagtgaattgaagaagagcctagattgcatgcacaaagaccaggtggaaaaggaagggaaagtgagagaggaaatagctgaatatcagctacggcttcatgaagctgaaaagaaacaccaggctttgcttttggacacaaacaaacagtatgaagtagaaatccagacataccgagagaaattgacttctaaagaagaatgtctcagttcacagaagctggagatagaccttttaaagtctagtaaagaagagctcaataattcattgaaagctactactcagattttggaagaattgaagaaaaccaagatggacaatctaaaatatgtaaatcagttgaagaaggaaaatgaacgtgcccaggggaaaatgaagttgttgatcaaatcctgtaaacagctggaagaggaaaaggagatactgcagaaagaactctctcaacttcaagctgcacaggagaagcagaaaacaggtactgttatggataccaaggtcgatgaattaacaactgagatcaaagaactgaaagaaactcttgaagaaaaaaccaaggaggcagatgaatacttggataagtactgttccttgcttataagccatgaaaagttagagaaagctaaagagatgttagagacacaagtggcccatctgtgttcacagcaatctaaacaagattcccgagggtctcctttgctaggtccagttgttccaggaccatctccaatcccttctgttactgaaaagaggttatcatctggccaaaataaagcttcaggcaagaggcaaagatccagtggaatatgggagaatggtggaggaccaacacctgctaccccagagagcttttctaaaaaaagcaagaaagcagtcatgagtggtattcaccctgcagaagacacggaaggtactgagtttgagccagagggacttccagaagttgtaaagaaagggtttgctgacatcccgacaggaaagactagcccatatatcctgcgaagaacaaccatggcaactcggaccagcccccgcctggctgcacagaagttagcgctatccccactgagtctcggcaaagaaaatcttgcagagtcctccaaaccaacagctggtggcagcagatcacaaaaggtcaaagttgctcagcggagcccagtagattcaggcaccatcctccgagaacccaccacgaaatccgtcccagtcaataatcttcctgagagaagtccgactgacagccccagagagggcctgagggtcaagcgaggccgacttgtccccagccccaaagctggactggagtccaagggcagtgagaactgtaaggtccagtgaaggcactttgtgtgtcagtacccctgggaggtgccagtcattgaatagataaggctgtgcctacaggacttctctttagtcagggcatgctttattagtgaggagaaaacaattccttagaagtcttaaatatattgtactctttagatctcccatgtgtaggtattgaaaaagtttggaagcactgatcacctgttagcattgccattcctctactgcaatgtaaatagtataaagctatgtatataaagctttttggtaatatgttacaattaaaatgacaagcactatat

SEQ ID NO: 33 - DNA, 7217 bp, human
gcccacgaagaggtacgattccggagaatcgcgaggcagagcgggagcgcgcagccaggtggaaactaattctaagccagactgctggagatcaccctgttctagtgtgtggaggcttccaccaggagtctggagtgcaatggcacgatctcggctcactgcaacctccacctcccaggttcaagcgattctcctgcctcagcctcccaagtagctgggattacaggcgcattggagtgactgtctggcatcaccaagatgacactccacgccacccggggggctgcactcctctcttgggtgaacagtctacacgtggctgaccctgtggaggctgtgctgcagctccaggactgcagcatcttcatcaagatcattgacagaatccatggcactgaagagggacagcaaatcttgaagcagccggtgtcagagagactggactttgtgtgcagttttctgcagaaaaatcgaaaacatccctcttccccagaatgcctggtatctgcacagaaggtgctagagggatcagagctggaactggcgaagatgaccatgctgctcttataccactctaccatgagctccaaaagtcccagggactgggaacagtttgaatataaaattcaggctgagttggctgtcattcttaaatttgtgctggaccatgaggacgggctaaaccttaatgaggacctagagaacttcctacagaaagctcctgtgccttctacctgttctagcacattccctgaagagctctccccacctagccaccaggccaagagggagattcgcttcctagagctacagaaggttgcctcctcttccagtgggaacaactttctctcaggttctccagcttctcccatgggtgatatcctgcagaccccacagttccagatgagacggctgaagaagcagcttgctgatgagagaagtaatagggatgagctggagctggagctagctgagaaccgcaagctcctcaccgagaaggatgcacagatagccatgatgcagcagcgcattgaccgcctagccctgctgaatgagaagcaggcggccagcccactggagcccaaggagcttgaggagctgcgtgacaagaatgagagccttaccatgcggctgcatgaaaccctgaagcagtgccaggacctgaagacagagaagagccagatggatcgcaaaatcaaccagctttcggaggagaatggagacctttcctttaagctgcgggagtttgccagtcatctgcagcagctacaggatgccctcaatgagctgacggaggagcacagcaaggccactcaggagtggctagagaagcaggcccagctggagaaggagctcagcgcagccctgcaggacaagaaatgccttgaagagaagaacgaaatccttcagggaaaactttcacagctggaagaacacttgtcccagctgcaggataacccaccccaggagaagggcgaggtgctgggtgatgtcttgcagctggaaaccttgaagcaagaggcagccactcttgctgcaaacaacacacagctccaagccagggtagagatgctggagactgagcgaggccagcaggaagccaagctgcttgctgagcggggccacttcgaagaagaaaagcagcagctgtctagcctgatcactgacctgcagagctccatctccaacctcagccaggccaaggaagagctggagcaggcctcccaggctcatggggcccggttgactgcccaggtggcctctctgacctctgagctcaccacactcaatgccaccatccagcaacaggatcaagaactggctggcctgaagcagcaggccaaagagaagcaggcccagctagcacagaccctccaacagcaagaacaggcctcccagggcctccgccaccaggtggagcagctaagcagtagcctgaagcagaaggagcagcagttgaaggaggtagcggagaagcaggaggcaactaggcaggaccatgcccagcaactggccactgctgcagaggagcgagaggcctccttaagggagcgggatgcggctctcaagcagctggaggcactggagaaggagaaggctgccaagctggagattctgcagcagcaacttcaggtggctaatgaagcccgggacagtgcccagacctcagtgacacaggcccagcgggagaaggcagagctgagccggaaggtggaggaactccaggcctgtgttgagacagcccgccaggaacagcatgaggcccaggcccaggttgcagagctagagttgcagctgcggtctgagcagcaaaaagcaactgagaaagaaagggtggcccaggagaaggaccagctccaggagcagctccaggccctcaaagagtccttgaaggtcaccaagggcagccttgaagaggagaagcgcagggctgcagatgccctggaagagcagcagcgttgtatctctgagctgaaggcagagacccgaagcctggtggagcagcataagcgggaacgaaaggagctggaagaagagagggctgggcgcaaggggctggaggctcgattactgcagcttggggaggcccatcaggctgagactgaagtcctgcggcgggagctggcagaggccatggctgcccagcacacagctgagagtgagtgtgagcagctcgtcaaagaagtagctgcctggcgtgacgggtatgaggatagccagcaagaggaggcacagtatggcgccatgttccaggaacagctgatgactttgaaggaggaatgtgagaaggcccgccaggagctgcaggaggcaaaggagaaggtggcaggcatagaatcccacagcgagctccagataagccggcagcagaacaaactagctgagctccatgccaacctggccagagcactccagcaggtccaagagaaggaagtcagggcccagaagcttgcagatgacctctccactctgcaggaaaagatggctgccaccagcaaagaggtggcccgcttggagaccttggtgcgcaaggcaggtgagcagcaggaaacagcctcccgggagttagtcaaggagcctgcgagggcaggagacagacagcccgagtggctggaagagcaacagggacgccagttctgcagcacacaggcagcgctgcaggctatggagcgggaggcagagcagatgggcaatgagctggaacggctgcgggccgcgctgatggagagccaggggcagcagcaggaggagcgtgggcagcaggaaagggaggtggcgcggctgacccaggagcggggccgtgcccaggctgaccttgccctggagaaggcggccagagcagagcttgagatgcggctgcagaacgccctcaacgagcagcgtgtggagttcgctaccctgcaagaggcactggctcatgccctgacggaaaaggaaggcaaggaccaggagttggccaagcttcgtggtctggaggcagcccagataaaagagctggaggaacttcggcaaaccgtgaagcaactgaaggaacagctggctaagaaagaaaaggagcacgcatctggctcaggagcccaatctgaggctgctggcaggacagagccaacaggccccaagctggaagcactgcgggcagaggtgagcaagctggaacagcaatgccagaagcagcaggagcaggctgacagcctggaacgcagcctcgaggctgagcgggcctcccgggctgagcgggacagtgctctggagactctgcagggccagttagaggagaaggcccaggagctagggcacagtcagagtgccttagcctcggcccaacgggagttggctgccttccgcaccaaggtacaagaccacagcaaggctgaagatgagtggaaggcccaggtggcccggggccggcaagaggctgagaggaaaaatagcctcatcagcagcttggaggaggaggtgtccatcctgaatcgccaggtcctggagaaggagggggagagcaaggagttgaagcggctggtgatggccgagtcagagaagagccagaagctggaggagagctgcgcctgctgcaggcagagacagccagcaacagtgccagagctgcagaacgcagctctgctctgcgggaggaggtgcagagcctccgggagggaggctgagaaacagcgggtggcttcagagaacctgcggcaggagctgacctcacaggctgagcgtgcggaggagctgggccaagaattgaaggcgtggcaggagaagttcttccagaaagagcaggccctctccaccctgcagctcgagcacaccagcacacaggccctggtgagtgagctgctgccagctaagcacctctgccagcagctgcaggccgagcaggccgctgccgagaaacgccaccgtgaggagctggagcagagcaagcaggccgctgggggactgcgggcagagctgctgcgggcccagcgggagcttggggagctgattcctctgcggcagaaggtggcagagcaggagcgaacagctcagcagctgcgggcagagaaggccagctatgcagagcagctgagcatgctgaagaaggcgcatggcctgctggcagaggagaaccgggggctgggtgagcgggccaaccttggccggcagtttctggaagtggagttggaccaggcccgggaaaagtatgtccaagagttggcagccgtacgtgctgatgctgagacccgtctggctgaggtgcagcgagaagcacagagcactgcccgggagctggaggtgatgactgccaagtatgagggtgccaaggtcaaggtcctggaggagaggcagcggttccaggaagagaggcagaaactcactgcccaggtggaagaactgagtaagaaactggctgactctgaccaagccagcaaggtgcagcagcagaagctgaaggctgtccaggctcagggaggcgagagccagcaggaggcccagcgcttccaggcccagctgaatgaactgcaagcccagttgagccagaaggagcaggcagctgagcactataagctgcagatggagaaagccaaaacacattatgatgccaagaagcagcagaaccaagagctgcaggagcagctgcggagcctggagcagctgcagaaggaaaacaaagagctgcgagctgaagctgaacggctgggccatgagctacagcaggctgggctgaagaccaaggaggctgaacagacctgccgccaccttactgcccaggtgcgcagcctggaggcacaggttgcccatgcagaccagcagcttcgagacctgggcaaattccaggtggcaactgatgctttaaagagccgtgagccccaggctaagccccagctggacttgagtattgacagcctggatctgagctgcgaggaggggaccccactcagtatcaccagcaagctgcctcgtacccagccagacggcaccagcgtccctggagaaccagcctcacctatctcccagcgcctgccccccaaggtagaatccctggagagtctctacttcactcccatccctgctcggagtcaggcccccctggagagcagcctggactccctgggagacgtcttcctggactcgggtcgtaagacccgctccgctcgtcggcgcaccacgcagatcatcaacatcaccatgaccaagaagctagatgtggaagagccagacagcgccaactcatcgttctacagcacgcggtctgctcctgcttcccaggctagcctgcgagccacctcctctactcagtctctagctcgcctgggttctcccgattatggcaactcagccctgctcagcttgcctggctaccgccccaccactcgcagttctgctcgtcgttcccaggccggggtgtccagtggggcccctccaggaaggaacagcttctacatgggcacttgccaggatgagcctgagcagctggatgactggaaccgcattgcagagctgcagcagcgcaatcgagtgtgccccccacatctgaagacctgctatcccctggagtccaggccttccctgagcctgggcaccatcacagatgaggagatgaaaactggagacccccaagagaccctgcgccgagccagcatgcagccaatccagatagccgagggcactggcatcaccacccggcagcagcgcaaacgggtctccctagagccccaccagggccctggaactcctgagtctaagaaggccaccagctgtttcccacgccccatgactccccgagaccgacatgaagggcgcaaacagagcactactgaggcccagaagaaagcagctccagcttctactaaacaggctgaccggcgccagtcgatggccttcagcatcctcaacacacccaagaagctagggaacagccttctgcggcggggagcctcaaagaaggccctgtccaaggcttcccccaacactcgcagtggaacccgccgttctccgcgcattgccaccaccacagccagtgccgccactgctgccgccattggtgccacccctcgagccaagggcaaggcaaagcactaaagggccagtaccagtgagtggccccacctgtgtccccgatgctgccgtcacctggtcctccgcctactgtccctctcagtgccttctctcagctcccaggccaacagtagccaaacccctagagacagtgatgcctgcccgcaccctggcctggcccctggtccttcactggcgccttctcggagctggcccagggggcctggagcatggacagtgtgggcgctctccctaccttgcctccttttttcttaaagcaaagtcacttctccatcacaaccagatttgaggctggttttgatggctgggtccttgggcctggccagtcttcctcttagcctctggatctagaagggaccataagaggagtaggccctggttcctgctgtcctggtggctgggccagcaggggccctcactcttgaagtccaggactgggtctgacctggtgggagcacctgccagaggatgctctttcccaggacggatgggccctgtgtctcaggagtggggttgggggacagccttcagcagcagctcacaccctaccttccccagacttgcactggggtgggatttggagtgatgggaaggtttttaagggccggggatggatcttttctaaatgttattacttgtaaataaagtctattttt

SEQ ID NO: 34 - DNA, 769 bp, human
  misc_feature (635)..(635): n is a, c, g, or t
ttaaatatttttttatttactttattttaaaattatctgcctccctgtaggtatcattttttgaagggggttaacctgctgaagttttgccagaatggtgactggctgcgcttgggttcggtgaactcaaagacctgcgactgagcgatgccgtcggggaccaggtactggccgtggtttaacgggtcctgcggtggtgggtaggaaggaggaactgagcgggcagagttgacacctttttgcttagggacttttctcacagtcattgcagcctgcctcttctggttttcagaaatttcaaagccaattttttcatcttcctgtaccattttcctctcttctctgaaagccctgagccagcgtattttttcctccagcttcttggcaaagaacagatgtatctcctcagtctccttgttgtgaagcttaaaggcattcttcatgctgacattgaagtcatcatctctgccatcctcaatgtcaactacctcatatttatccatgtcaatgcggcctttgtagtacaggatgtctctccggattaggtccttcttgcagaggaccatctggtggtcaaacaggaagaagacccgctgctgggtgcgggcgtaggggctgtagatcccagccatctncccagtgtagatcagcttcgagcttctgtctaggatgtcctcgcccttccagtctaggacaggagccctgcactgagcaatcttgtcaatattctctaacgtcgcttgcgttccgtgatctgctgagtaccatt

SEQ ID NO: 35 - DNA, 4452 bp, human
cgccggtgaggtaggggcgggaggcggggggagacatggctcggcgcggctggcggcgggcacccctccgccgtggcgtcggcagcagtccccgagcccgcaggctcatgcggcccctttggttgctcctcgcagtgggcgtctttgactgggcaggggcttcggacggcggcggcggagaggctagagccatggacgaggagatcgtgtccgagaagcaagccgaggagagccaccggcaggacagcgccaacctgctcatcttcatcctgctgctcaccctcaccattctcacaatctggctcttcaagcaccgccgggcccgcttcctgcacgaaaccggcctggctatgatttatggtcttttggtgggccttgtgcttcggtatggcattcatgttccgagtgatgtaaataatgtgaccctgagctgtgaagtgcagtcaagtccaactaccttactggttacttttgatccagaagtatttttcaacatattacttcctcctatcatattttatgcaggttatagcctgaaaaggagacatttttttcgaaatcttgggtctatcctagcatacgcttttcttggaacagcaatttcttgtttcgttattgggtcaataatgtatggctgtgtaacgctgatgaaggtaacgggacaacttgcaggagatttttactttacagattgcctactgtttggtgccattgtatcagcaactgatccagtgactgttcttgctatattccacgagcttcaagttgatgttgaactctatgcacttctttttggtgaaagtgtcctcaatgatgctgttgccatagtgctgtcctcctcaatagtggcataccagccagctggagacaacagtcacacctttgatgtcacagcgatgttcaagtctattgggatcttccttggaatcttcagtggatcttttgcaatgggtgctgctactggagtggtgacagctttagtgacaaagttcaccaaattacgggagttccagttgttggagacaggcctgttcttcttgatgtcctggagtaccttcctcttggctgaagcatggggcttcacaggtgtagttgcagtattgttttgtggcatcacacaagcacattatacgtataataatttgtccacggagtctcagcatagaactaaacagttgtttgagcttctcaatttcttggcagagaatttcatcttctcctacatggggctgacactgttcaccttccagaaccatgtctttaacccaacatttgtagtaggagcatttgttgctattttcttgggaagagctgccaatatttaccccttgtccctcttacttaatttgggtagaagaagtaagattggatcaaattttcaacacatgatgatgtttgctggccttcgtggtgcaatggcatttgccttggccattcgagatactgccacttatgcacggcaaatgatgttcagcaccacgcttctgattgtgttttttaccgtgtgggtatttggtggtggcaccactgcaatgctgtcatgcttgcatatcagggttggtgttgattcagaccaagaacacttgggtgttcctgaaaatgaaaggagaactaccaaagcagagagtgcttggcttttccggatgtggtacaactttgatcataactatctgaagcctctgctgacccacagcgggcctccgctgacaacaacactccctgcctgctgtggacccatcgccaggtgcctcaccagcccccaggcttacgaaaaccaggaacagttgaaagatgatgattctgatcttattctcaatgatggtgacatcagtttgacatatggagattctactgtgaacactgaaccggccacatccagcgccccaaggagatttatgggaaacagttctgaagatgccttggatcgggagcttgcatttggggaccatgaactggtcattcgaggaacacgcctggttcttccaatggatgattctgaacccccgctaaatttgttagataatacgagacatggtccagcctaagcttactaatactcacttagtgatttgtaaaatttgcacatgtgattgtgaagaaatttgtactacctaaaagtcccagtgcatgtctctgaatgtgtaagctatataaatgctatttatatggcatagaaagaatataaatatcctgtacacggcagattgtgaacaaactatattcctttaagttttcctggttgcactctgtagactggatctgttttaggaagttactttcacagtgatgttgtgtgttctgttagttttatgtctcagttaaagtgtaaaaagtgacggattttctctttcttaaacttacctgacacttaaccagagtaccagttctcgtgatgtgaattaatttttttgtgtgctaggggagggagagtgaggagggagtgttatttccttgggaacctagggaggagaggttcctttgttgggaaacttttgttgatagctgctgcctttgtcctgatcgttttctttcccttttctctggtggcctgttgtggtgcaacgagctgatggcatttgatcttgccccattcaggttggggagtgaagtgtggggacccttttcccccgcttgctgtgaaagcacagattcattgactacagtacactgttgttcagaaaagaaggctgcaaatgacttctgagactttatgtcttttcttccagaccaagaccgtagaaggagtcacatctagccggcttagccaaagtacaggtgtatatagttcagggcacttgatttagatttggaggggctggggtgggcagagagcaagaggcgagtaaagagaatggtggtttcagagatctctcttcccaaatgtgtaaatattctataccagataagtttaaataagaaatttaattgctgcttaatttttgattatgtactttatctgtatagcaggctttgtcgtcagaagtttttatatcgatttaaattgctgctctttagcagccaaacaggagcaaaatgtaaaatttttgaacttactgtgtctaatcatcatttgttagtctgtagttaatgtcaacagttaatttatgaacccacgatcgttccacactgcaccaaagtcagtcataagagaaatcgaatattctggagcactgattgcagcagggtggctcctttgtgtgcagcaggtgtagtagtcttcattttcatggtacgttttaatattaattacctaagctgccatgcattttttttttacagttctcaaggaagagcacagaacaatttctcatttcatatttggagtatgaaagtagattctattttgtaatgctgataatacctaaagatgcattgaatgcttggaagaatgctttttgatgttgattttgacctgttcatgattcagaagaaaaacaaacttttttggattttttttccctcaggtctgagtagcattgccttaaatcttatccagttagaacattgatttatttacatgatgttcagattttccagtgaaaaatacccttctgaacaaaacatgtacttactctccgaaaggcatctatctgtgctattgcaaacactccttgagattttaggggaattctaatgttgtaccctttcgtggcagctttgactgttggcatagccatttgttatgtagtggtagcgactttcctgctatgcaggaatccctcccatgacgtgtatgttttacatgatgtgtgcctcttcacgcagtaaatagtttcttgttaatgtatgtttgaggagtttgaacgtcagtgtcacttacccacaaagttattcaagttgtaaaaggttataaataatttaacaactaccttttttattctgtcgggttactgacctcactttatgtaaatacttcgcatgacaaattcagtaactcgtctatttcagcatgcataagacttttcactagggaaactgataaagcttgagtcaactaaatctgccttcatactttatcaaggggaaccaagcctgctgtgcttacatcagcatctggaagactttcctctcctctaatctgtgtacacatctccaagcaaggaagaaaaaacaaactctgctcagacgcctatgaaacacctgaatgaactttgatgaagtacagtctgagttaccatcatgcacaagtagaactgctcttggacttgttttcctgttgtttgtggaacctacgcgtttgaatggcttgaacgttgcatcttttaaagttattttttaaggtttcttggcatttatcctagttgtccgtgtttggcaatgtgctgttaaagtaatagacttttaatctttatgtattttttgttttctctggagtacttggacagatgttatagtggtttcttttaggaaaatctgtcattaaaaaagttatagccttgcaaataaccactc

SEQ ID NO: 36 - DNA, 569 bp, human
  misc_feature (464)..(464): n is a, c, g, or t
gcggccgccacgacccccctggacgtctgtaagacccttctgaacactcaggagaacgtggccctctcgctggccaacatcagcggccggctgtcgggtatggccaatgccttccggacggtgtaccagctcaacggcctggccggctacttcaaaggcatccaggcgcgtgtcatctaccagatgccctccaccgccatttcttggtctgtctatgagttcttcaagtacttcctcaccaagcgccagctggaaaatcgagctccatactaaaggaagggatcatagaatcttttcttaaagtcattctctgcctgcatccagccccttgccctctcctcacacgtagatcattttttttttttgcagggtgctgcctatgggccctctgctccccaatgccttagagagaggaggggacggcacggccgctcaccggaaggctgtgtgcggggacatccgangtggtggtggacaggaaggacttgggaaggggagcgagaaattgctttttctcttcctccctgggcagaatgtagcttttctgcttcactgtggcagcctcctcc

SEQ ID NO: 37 - DNA, 6239 bp, human
cgatctgcttctgatgaaagctctggtatcgagactttagtggaggagctctgctccagactgaaagaccttcagagtaagcaagaagagaagattcacaaaaagttagaggggtctccctctccagaggcagaattatcccctccagcaaaggatcaagtggaaatgtactatgaagcatttccaccactttctgagaaaccagtttgcctgcaagaaatcatgactgtgtggaacaagtctaaagtctgttcttactctagctcttcttcatcatccacagccccaccagctagcacagatacttcctctcctaaggactgcaacagtgaaagtgaagtcaccaaggaaagaagcagtgaagtacccaccactgtgcatgagaaaacccagagcaaaagcaaaaacgagaaggaaaacaaatttagtaatggcacaattgaagaaaagcctgctttgtacaaaaagcaaatccgacataaacctgaaggaaagattcgccctcgctcgtggtcttctggctccagtgaagcaggctcaagttccagtgggaatcagggagaattaaaagcatccatgaagtatgttaaagtaagacacaaggcacgagagattcgaaacaaaaaagggcggaatgggcaaagcaggctttctttgaagcacggtgaaaaggctgaaaggaacattcatactggaagtagtagcagtagcagcagtggttctgtcaaacagctgtgcaagcggggtaagagacctttaaaagaaatagggagaaaagatcctgggagcactgaaggaaaagacctgtacatggagaatagaaaggacacagagtataaagaggagcccttgtggtacaccgagccaattgctgaatattttgttcctctgagcagaaaaagtaaactagagaccacataccgaaacagacaggatacaagtgatctgacatcagaggcagtggaagaattgtctgaatcagtgcatggtctttgtatcagcaacaataatcttcataaaacatacctcgcagcaggtactttcattgatggtcattttgtagaaatgcctgcagttataaatgaggatattgacctcactgggacctcattatgttctctaccagaggacaataaatacctggatgatattcatctatcagaattaacgcacttctatgaagtggatattgatcaatccatgttggatcctggtgcctcagaaacaatgcaaggagaaagtcggattttgaatatgattcgacagaaaagcaaagagaacacagattttgaggcagaatgttgcatagtgttagatggtatggagttgcaaggggaacgtgcaatatggacagattctaccagctccgtaggtgctgagggcttattcctgcaggaccttggcaatctggctcagttttgggagtgctgttcatccagctccggtgatgctgatggggagagttttggaggagactctccagttagactctctcccatcttagacagcacagtgctcaattcacacctgcttgctggcaatcaagagctcttttcagatattaatgaaggatctggtataaactcttgtttttcagtgtttgaagtgcaatgcagtaattctgttttaccattttcttttgaaacactcaacttgggaaatgaaaatacagattctagtgctaatatgcttgggaaaacacagtctagattgctaatatggaccaaaaatagtgcctttgaagaaaatgaacactgttctaatctttcaacaagaacttgtagtccatggtcccattcagaagaaacacgttcagacaatgaaacattaaatattcagtttgaagaatccacacagtttaatgccgaagatattaattatgtagttcctagagtctcgtcaaattatgtagatgaagaacttctagattttttgcaagatgaaacttgccagcaaaacagtagaactttaggtgagattcctacattagttttcaaaaaaacatctaaactagaatccgtctgtggtattcagctagaacaaaaaacagaaaacaaaaattttgaaactacacaagtatgtaatgaaagtccacatggagatggctacagctcaggggttattaaagacatttggacaaagatggcagacacaaattctgtggctacagtagaaatagaaagaactgatgctgagttgttttcggcagatgtaaataactactgctgctgtctagatgctgaagctgaactggagacccttcaggagcctgataaggctgtgcggaggtcagagtaccatctgtgggagggacagaaagagagcctggagaaaagagcatttgcttctagtgagctatcaaacgtggatggtggtgattatacaacaccctctaaaccctgggatgtagcccaagataaagaaaacacattcattcttggaggagtttatggagaactcaaaaccttcaatagtgatggggagtgggcagtcgtaccacctagtcacacaaaaggaagtctgttacagtgtgcagcttctgatgttgtgacgatagctggtacagatgtctttatgaccccaggaaacagttttgctcctgggcacaggcagttatggaaacccttcgtgtcatttgaacagaatgatcagccgaagagtggggaaaatgggttaaataagggattttcttttatcttccatgaagacttactaggagcttgtggcaactttcaagtcgaagatcctggacttgaatactcattttcttcctttgacttaagcaatccattttcacaagttcttcatgtagaatgctcatttgaacctgaagggattgcatctttcagccccagttttaaaccgaaatcaatcctctgttctgattcagacagtgaagtgtttcaccccaggatatgtggtgttgacagaacacaatacagggctattcggatctctcctcggactcactttcgcccaatttctgcatccgaactgtccccaggaggaggaagcgagtcagaatttgaatctgagaaagatgaagcaaatattcccattccttctcaagttgatatatttgaagatccgcaggcagatctcaaacctttggaagaagatgcagagaaagaaggccattactatggaaaatcagagcttgagtctggaaaattccttcccaggttaaaaaaatctgggatggaaaagagtgctcagacatcactggattcccaggaggaatcaactgggattctttcagtaggaaagcaaaatcagtgtttggaatgtagcatgaatgaatccctggaaatagatttagaaagctcagaagcaaattgtaaaataatggcacaatgcgaggaagaaattaataatttttgtggttgcaaagcaggttgtcagtttcctgcttatgaagataatccagtttcttcgggacagctggaagagttccctgtattgaacactgatatacaaggaatgaatagaagtcaagaaaaacagacctggtgggaaaaagccttgtactctcctctttttcctgcatcagagtgtgaagaatgttacacaaatgccaagggagagagtggtttagaagaatatccagatgctaaagagacacccagtaatgaagagcgcctgttagattttaatagggtgtcttctgtttatgaagcaagatgtacaggagagagagattctggagcaaagtcagatggcttccgcggaaagatgtgctccagcgccagctccacctcggaagagacaggctcagaaggcggaggcgagtgggtgggccctagtgaagaggagctcttttctcgaactcatctctaaacctgcaaaatagtacaaattattgtttaaaaatgatatgtgatggaaaattactcttcagtgagacctgttaatctaaaacaacaacttaggtttcctcttcaattaactgattcagattggtaataattatctttctcttcttgcttattttagagttgaggacagctatcctgttaaagattttttttcccagctgttaaattcttggctatttgaaatagactagattgtgttgtcaaatcaagaatgggtgtgcatgtgcttgtcttagaagtatcactgctttttgcatcttaactgcagttaattttccttccgactgcggttatatcactatgaccttactagcattgcagtgtcaacaaccacttctgctcttcagagacttcagctttggagcatttaggctttgttctccaagaactgggatatccattcttaccctacagtggcttgatgcctttctgaaggcgagagggaagcctgggtgactcagcggtggtctccattcagcaaaatctcatgtacatttccagtaggaaccgcagaggtgtgcttttcaagactcaccaaatactgtgttttctctcttaggatttcttttcccctaaagtatcacggaagatactatggttcgtgactttcttgctaactgaagaagccaaggatttggggtgtggggtcgtatgcgagacacagtggggtaagggtgcataccccaccccttacctgctctcatactgcagttacatttacaccaaaaccccatgcagggttctttgtggtgagtgttccatacgtgctaaggaccttagttgcagattgttactttctggtgacctatgttgaattgaaacccccaaaacttgaaattgtgaacatttgacatgcagtaaaggccacctcatcacccagagaaatctttggctgctgcagctagccgcttcttggctgtgatgtagtatagcttcgatctcattttgtgtttgagagaatgttctgggcaagttctgtgtgtggtgggttggggcgggtagagtcatgagttttccacatccctgtgtggtggttttgctgactgtcgctccgtgggactggctcccgtttctccttggtgagcccggggagccggcgcatcttgtgagtcgcgtctgtgcatggcgatccgctcctccggctctcatggcattgtgccacaggcagaggccaggaggagcagtatgtgcacagccgaaacattttacattttttacattgtttttcttttttaaccaactcattgtttaaaaaacaaaaacaaaaaaaacctaatctgtgaaatcagcgtagcatgcctggagcatcaggaatggcagaaaagtctgatgcgctctagacagcttcaccactcatttgggcaggcagtaaacacacatataatttattagctgggagctgaactggctgtgaaatctatgatttgctttgaacatttgggttttgttgcctttttcttaattgataacacagaaaagaaagtaccatcaaagactgtggagtcattgagggtctgtgtgtcctcaccgagagggacctggtgtgcccgccgggtcgatcttcccacgtgttagggtttatttttatacaacacatcttttgacactttaaggtgggtgggtgtgtgtgtgtgtgtgtgtgtgcgcgcgtgcgcgcgcgcatgtgtaaggttttatgttgctgttatttatttacgaacttcagatacgtttttatgtatttttcattcttctggagcttcctaaaaattgataagcatctgcactgaaatataatttaacagcaaaagtaaaaaaggattgaaagttgtaaattcctcatatcactacagtgacgattattctagaaatcgttgcttgtgtagcaaagaccaaataaatagatttcagacacaaccttgagcacagttgattttggacagctgctgtttattaggaaagggctccaggtggcaaaggtgcacacttcctcagacacaggtgagaagatgcagcaccttccacaggtgaatgggacggattcgaagtgagcaaagggattcacaaattatgtatttatttgttttcatagttaagtagctgaagctcagaggctttcagcaacagagatgaaagtgtggctttttagttttgtgaatggatgatcacaaagaaaaagcatttttaaaaagttggcaaacgctgaaacgcactgtggtatgaagcgcattgcatttccatagcactgaagtaccagtttccattcctgggctgagattgtttttcccgtggttgtattgttctgatttcacgtacaccagagtaactgatttttttttgtttgttttcttgtggagttaacaccaaataaaaattgtaaaaaac

SEQ ID NO: 38 - DNA, 539 bp, human
tttttttttttttttttttttaaatgtatactattaaagttggattattaatctaatatttgtgtttgccttggggactaataaacctcacaacctgaggatcacctcagttaaaccaaggctttgtcatcacagagctactcagcagaggtctgtctcagctgttccttgaactaaggaaggagtcagtcagctaggagagaaaagtccttttgaaagcagacagcatcatgtaccttgctgactcagctacatacataaggcctcaagccttgctgccagttcttaaaggaactgtgttctcttttcacttttcctggcttatggggcagtagagggtttccgacctcaaatgccaataccaggtaggtagaaggaccttaggctcaactgctggctcctcgtaataacacacactgtattctgtggtgggtgccactctgctctgcctgtgtcatgtcacctttcctaatccagcacatcctcgcccaagaaaaccctattttggggtcattcattctattcttatttctctctta

SEQ ID NO: 39 - DNA, 1843 bp, human
gggcacgagggcagagccagttcctagcgcagagccgcgcccgccatgagggagatcgtgcacatccaggcgggccagtgcgggaaccagatcggcaccaagttttgggaagtgatcagcgatgagcacggcatcgacccggccggaggctacgtgggagactcggcgctgcagctggagagaatcaacgtctactacaatgagtcatcgtctcagaaatatgtgcccagggccgccctggtggacttagagccaggcaccatggacagcgtgcggtctgggccttttgggcagcttttccggcctgacaacttcatctttggccagacgggtgcagggaacaactgggcgaaagggcactacacggagggcgcggagctggtggacgcagtgctggacgtggtgcggaaggagtgcgagcactgcgactgcctgcagggcttccagctcacgcactcgctgggcggcggcacgggctcaggcatgggcacgctgctcatcagcaagatccgtgaggagttcccggaccgcatcatgaacaccttcagcgtcatgccctcgcccaaggtgtcggacacggtggtggagccctacaatgccacactgtcggtgcaccagctggtggagaatacagacgagacctactgcatcgacaacgaggcgctctatgacatctgcttccgcactctgaagctgacaacgcccacctacggggacctcaaccacctggtgtccgccaccatgagtggggtcaccacctcgctgcgcttcccgggccagctcaatgctgacctgcgcaagctggcggtgaacatggtgcccttcccgcgcctgcacttcttcatgcctggcttcgcgccgctcaccagccgcggcagccagcagtaccgggccctgaccgtgcccgagctcacccagcagatgttcgacgccaggaacatgatggccgcctgcgatccgcgccatggccgctacctgaccgtggccaccgtgttccgcgggcccatgtccatgaaggaggtggacgagcagatgctggccatccagagtaagaacagcagctacttcgtggagtggattcccaacaacgtgaaggtggccgtgtgcgacatcccgccccgcggcctgaagatggcctccaccttcatcggcaacagcacggccatccaggagctgttcaagcgcatctccgagcagttctcagccatgttccggcgcaaggccttcctgcactggttcacgggtgagggcatggatgaaatggagttcaccgaggcggagagcaacatgaacgacctggtatccgagtaccagcagtaccaggatgccaccgccaatgacggggaggaagcttttgaggatgaggaagaggagatcgatggatagtcggaatagagccgccccaactcagatcctacaacacgcaagttccttcttgaaccctggtgcctcctaccctatggccctgaatggtgcactggtttaattgtgttggtgtcggcccctcacaaatgcagccaagtcatgtaattagtcatctggaacaaagactaaaaacagcagagaattgcgggttctacccagtcagaagatcacaccatggagactttctactagaggacttgaaagagaactgaggggccacaaaataaacttcaccttccattaagtgttcaagcatgtctgcaaattaggagggagttagaaacagtctttttcatcctttgtgatgaagcctgaaattgtgccgtgttgccttatatgaatatgcagtatgggactttgaaataatgattcataataaaatactaaacgtgtgtcttcaaaaaaaaaaaaaaaaaaa

SEQ ID NO: 40 - DNA, 1272 bp, human
gccggaggagacgcacgcagctgactttgtcttctccgcacgactgttacagaggtctccagagccttctctctcctgtgcaaaatggcaactcttaaggaaaaactcattgcaccagttgcggaagaagaggcaacagttccaaacaataagatcactgtagtgggtgttggacaagttggtatggcgtgtgctatcagcattctgggaaagtctctggctgatgaacttgctcttgtggatgttttggaagataagcttaaaggagaaatgatggatctgcagcatgggagcttatttcttcagacacctaaaattgtggcagataaagattattctgtgaccgccaattctaagattgtagtggtaactgcaggagtccgtcagcaagaaggggagagtcggctcaatctggtgcagagaaatgttaatgtcttcaaattcattattcctcagatcgtcaagtacagtcctgattgcatcataattgtggtttccaacccagtggacattcttacgtatgttacctggaaactaagtggattacccaaacaccgcgtgattggaagtggatgtaatctggattctgctagatttcgctaccttatggctgaaaaacttggcattcatcccagcagctgccatggatggattttgggggaacatggcgactcaagtgtggctgtgtggagtggtgtgaatgtggcaggtgtttctctccaggaattgaatccagaaatgggaactgacaatgatagtgaaaattggaaggaagtgcataagatggtggttgaaagtgcctatgaagtcatcaagctaaaaggatataccaactgggctattggattaagtgtggctgatcttattgaatccatgttgaaaaatctatccaggattcatcccgtgtcaacaatggtaaaggggatgtatggcattgagaatgaagtcttcctgagccttccatgtatcctcaatgcccggggattaaccagcgttatcaaccagaagctaaaggatgatgaggttgctcagctcaagaaaagtgcagataccctgtgggacatccagaaggacctaaaagacctgtgactagtgagctctaggctgtagaaatttaaaaactacaatgtgattaactcgagcctttagttttcatccatgtacatggatcacagtttgctttgatcttcttcaatatgtgaatttgggctcacagaatcaaagcctatgcttggtagctcttgaacaaataaaattaactattgtagtgtg

SEQ ID NO: 41 - DNA, 1508 bp, human
ggcacgaggctggcacctctgagcatccacgtacttgcaagaactcttgctcacatcagctaagagattgcacctgctgacctagagattccggcctgtgctcctgtgctgctgagcagggcaaccagtagcaccatgtctgtgactggcgggaagatggcaccgtccctcacccaggagatcctcagccacctgggcctggccagcaagactgcagcgtgggggaccctgggcaccctcaggaccttcttgaacttcagcgtggacaaggatgcgcagaggctactgagggccattactggccaaggcgtggaccgcagtgccattgtggacgtgctgaccaaccggagcagagagcaaaggcagctcatctcacgaaacttccaggagcgcacccaacaggacctgatgaagtctctacaggcagcactttccggcaacctggagaggattgtgatggctctgctgcagcccacagcccagtttgacgcccaggaattgaggacagctctgaaggcctcagattctgctgtggacgtggccattgaaattcttgccactcgaaccccaccccagctgcaggagtgcctggcagtctacaaacacaatttccaggtggaggctgtggatgacatcacatctgagaccagtggcatcttgcaggacctgctgttggccctggccaaggggggccgtgacagctactctggaatcattgactataatctggcagaacaagatgtccaggccctgcagcgggcagaaggacctagcagagaggaaacatgggtcccagtcttcacccagcgaaatcctgaacacctcatccgagtgtttgatcagtaccagcggagcactgggcaagagctggaggaggctgtccagaaccgtttccatggagatgctcaggtggctctgctcggcctagcttcggtgatcaagaacacaccgctgtactttgctgacaaacttcatcaagccctccaggaaactgagcccaattaccaagtcctgattcgcatccttatctctcgatgtgagactgaccttctgagtatcagagctgagttcaggaagaaatttgggaagtccctctactcttctctccaggatgcagtgaaaggggattgccagtcagccctcctggccttgtgcagggctgaagacatgtgagacttccctgccccaccccacatgacatccgaggatctgagatttccgtgtttggctgaacctgggagaccagctgggcctccaagtaggataacccctcactgagcaccacattctctagcttcttgttgaggctggaactgtttctttaaaatcccttaattttcccatctcaaaattatatctgtacctgggtcatccagctccttcttgggtgtggggaaatgagttttctttgatagtttctgcctcactcatccctcctgtaccctggccagaacatctcactgatactcgaattcttttggcaaacttcaaaaaaaaaaaaaaaaaaa

SEQ ID NO: 42 - DNA, 519 bp, human
gtttctttaaaaatgacatttgtattaaaagtcttaaaatgaagagacaatgattaaacgcatgaaattaaaaattacaattagttagaattggtacatcacaacagtaaaattttgctctttgcttctggaggaacaccctacaacaggtaattaaaaaatttaaaaataatatgaaaggggagctaaatacctgaaaatttaaacaaaatgaagcaaaaaaaagggaaacaaattcattgcaagagatggaaattacattttaaaggctgaaaataataaagaaattcactaaacaacaggccctattgtcctggctccttcagaaagattactgaaaggaaactgggaagtggtttggggaatagcagattctgggatatggtgggaagttcacaggttggcaccggctggaacagctgagttttgaaggcactctgcagacacaggggtgctgggggccctgaatcacatttacaaagtctttgtactgtatttttaaaagctagtcattaaaat

SEQ ID NO: 43 - DNA, 1177 bp, human
ggaaaggaaggtttaaaataattaatttaaaatgtcactaagtatagactgatgactgtatagagatgtgaaatgtataattacacatggaagcaatatgttgctgtgttgttattaggtttttttgtttttgttttctacatcttttaaagacttttggaaatttggctgaacaattagaacacaacaggccaactcatactcatttggatctatttagacaacgttaaccaatatatctatagctttagattatattcgataaaagtaattggactttttttctttttttgactcgttgacaagtgtctttgtaatatgtttttagttccctttttttgttgtattataggcagatgaacaaattaaatttggcctcaaagagagaacttactcccttctggatatttttgccacatttctttgcaaaaggagatatatatatctttagtcagttttgttgttatgagaaattatgggttattttgtggcatgctctttgggagctgcacagttatggggaggactcccactgctgtgcaagttaagtcttttacaaaacaaggacagcagaggagggtttgcagagacctccctctgaaaaacacaaagaatggactctctcctgggatgaggacttgctttctttacctccggttctttccatgtcttagttggatgtccctgaaatggacacaggctgtgcattgtgccagaaacattgtgttatcttttatgttgttgttgttgctgttaaactataatatgtgacttctttttttattattttttgtttgaatgctttaaaaatctttaagtctgtggactgctgatgtacagtgcctttgctgctatggatcaaatcaaagaccgtgtagatatactttattgtataagtagaaaattacttaatttcatactagaaatggatggatgctgcaagttgaaatggactgtccattgacgttcctaatgtggtagcagaaaaaaatggtgtcttaagtgcttagtgtttgatgtcattaacagtttcgtaaaactctacagtgtagaaagattttgatactaaactgtgcgttgtacatagttctaatgcattgtattgaccaccagtacttctataatggtagattgtttgtgaattcagacttttaagcattaaacataaataacttct

SEQ ID NO: 44 - DNA, 1241 bp, human
tgaaggggttacagcgcagccagatcctgcctactgaagagtatgaagaggcaatgagcactatgcaggtcagccagctggacctcttccggctgctggaccagaaccgtgatgggcaccttcagctccgtgaggttctggcccagactcgcctgggaaatggatggtggatgactccagagagcattcaggagatgtacgccgcgatcaaggctgaccctgatggtgacggagtgctgagtctgcaggagttctccaacatggaccttcgggacttccacaagtacatgaggagccacaaggcagagtccagtgagctggtgcggaacagccaccatacctggctctaccagggtgagggtgcccaccacatcatgcgtgccatccgccagagggtgctgcgcctcactcgcctgtcgcctgagatcgtggagctcagcgagccgctgcaggttgttcgatatggtgaggggggccactaccatgcccacgtggacagtgggcctgtgtacccagagaccatctgctcccataccaagctggtagccaacgagtctgtacccttcgagacctcctgccgctacatgacagtgctgttttatttgaacaacgtcactggtgggggcgagactgttttccctgtagcagataacagaacctacgatgaaatgagtctgattcaggatgacgtggacctccgtgacacacggaggcactgtgacaagggaaacctgcgtgtcaagccccaacagggcacagcagtcttctggtacaactacctgcctgatgggcaaggttgggtgggtgacgtagacgactactcgctgcacgggggctgcctggtcacgcgcggcaccaagtggattgccaacaactggattaatgtggaccccagccgagcgcggcaagcgctgttccaacaggagatggcccgccttgcccgagaagggggcaccgactcacagcccgagtgggctctggaccgggcctaccgcgatgcgcgcgtggaactctgagggaagagttagccccggttcccagccgcgggtcgccagttgcccaagatcaggggtccggctgtccttctgtcctgctgcagactaaaggtctggccaatgtcttgccccaccccgccagccgcgatacggcgcagttcctatattcatgttatttattgtgtactgactccatctgccccgtcaaataaaaaaccacaaggttcgaaaaaaaaaaaaaaaaaa

SEQ ID NO: 45 - DNA, 3737 bp, human
ggcgtccgcgcacacctccccgcgccgccgccgccaccgcccgcactccgccgcctctgcccgcaaccgctgagccatccatgggggtcgcgggccgcaaccgtcccggggcggcctgggcggtgctgctgctgctgctgctgctgccgccactgctgctgctggcgggggccgtcccgccgggtcggggccgtgccgcggggccgcaggaggatgtagatgagtgtgcccaagggctagatgactgccatgccgacgccctgtgtcagaacacacccacctcctacaagtgctcctgcaagcctggctaccaaggggaaggcaggcagtgtgaggacatcgatgaatgtggaaatgagctcaatggaggctgtgtccatgactgtttgaatattccaggcaattatcgttgcacttgttttgatggcttcatgttggctcatgacggtcataattgtcttgatgtggacgagtgcctggagaacaatggcggctgccagcatacctgtgtcaacgtcatggggagctatgagtgctgctgcaaggaggggtttttcctgagtgacaatcagcacacctgcattcaccgctcggaagagggcctgagctgcatgaataaggatcacggctgtagtcacatctgcaaggaggccccaaggggcagcgtcgcctgtgagtgcaggcctggttttgagctggccaagaaccagagagactgcatcttgacctgtaaccatgggaacggtgggtgccagcactcctgtgacgatacagccgatggcccagagtgcagctgccatccacagtacaagatgcacacagatgggaggagctgccttgagcgagaggacactgtcctggaggtgacagagagcaacaccacatcagtggtggatggggataaacgggtgaaacggcggctgctcatggaaacgtgtgctgtcaacaatggaggctgtgaccgcacctgtaaggatacttcgacaggtgtccactgcagttgtcctgttggattcactctccagttggatgggaagacatgtaaagatattgatgagtgccagacccgcaatggaggttgtgatcatttctgcaaaaacatcgtgggcagttttgactgcggctgcaagaaaggatttaaattattaacagatgagaagtcttgccaagatgtggatgagtgctctttggataggacctgtgaccacagctgcatcaaccaccctggcacatttgcttgtgcttgcaaccgagggtacaccctgtatggcttcacccactgtggagacaccaatgagtgcagcatcaacaacggaggctgtcagcaggtctgtgtgaacacagtgggcagctatgaatgccagtgccaccctgggtacaagctccactggaataaaaaagactgtgtggaagtgaaggggctcctgcccacaagtgtgtcaccccgtgtgtccctgcactgcggtaagagtggtggaggagacgggtgcttcctcagatgtcactctggcattcacctctcttcagatgtcaccaccatcaggacaagtgtaacctttaagctaaatgaaggcaagtgtagtttgaaaaatgctgagctgtttcccgagggtctgcgaccagcactaccagagaagcacagctcagtaaaagagagcttccgctacgtaaaccttacatgcagctctggcaagcaagtcccaggagcccctggccgaccaagcacccctaaggaaatgtttatcactgttgagtttgagcttgaaactaaccaaaaggaggtgacagcttcttgtgacctgagctgcatcgtaaagcgaaccgagaagcggctccgtaaagccatccgcacgctcagaaaggccgtccacagggagcagtttcacctccagctctcaggcatgaacctcgacgtggctaaaaagcctcccagaacatctgaacgccaggcagagtcctgtggagtgggccagggtcatgcagaaaaccaatgtgtcagttgcagggctgggacctattatgatggagcacgagaacgctgcattttatgtccaaatggaaccttccaaaatgaggaaggacaaatgacttgtgaaccatgcccaagaccaggaaattctggggccctgaagaccccagaagcttggaatatgtctgaatgtggaggtctgtgtcaacctggtgaatattctgcagatggctttgcaccttgccagctctgtgccctgggcacgttccagcctgaagctggtcgaacttcctgcttcccctgtggaggaggccttgccaccaaacatcagggagctacttcctttcaggactgtgaaaccagagttcaatgttcacctggacatttctacaacaccaccactcaccgatgtattcgttgcccagtgggaacataccagcctgaatttggaaaaaataattgtgtttcttgcccaggaaatactacgactgactttgatggctccacaaacataacccagtgtaaaaacagaagatgtggaggggagctgggagatttcactgggtacattgaatccccaaactacccaggcaattacccagccaacaccgagtgtacgtggaccatcaacccaccccccaagcgccgcatcctgatcgtggtccctgagatcttcctgcccatagaggacgactgtggggactatctggtgatgcggaaaacctcttcatccaattctgtgacaacatatgaaacctgccagacctacgaacgccccatcgccttcacctccaggtcaaagaagctgtggattcagttcaagtccaatgaagggaacagcgctagagggttccaggtcccatacgtgacatatgatgaggactaccaggaactcattgaagacatagttcgagatggcaggctctatgcatctgagaaccatcaggaaatacttaaggataagaaacttatcaaggctctgtttgatgtcctggcccatccccagaactatttcaagtacacagcccaggagtcccgagagatgtttccaagatcgttcatccgattgctacgttccaaagtgtccaggtttttgagaccttacaaatgactcagcccacgtgccactcaatacaaatgttctgctatagggttggtgggacagagctgtcttccttctgcatgtcagcacagtcgggtattgctgcctcccgtatcagtgactcattagagttcaatttttatagataatacagatattttggtaaattgaacttggtttttctttcccagcatcgtggatgtagactgagaatggctttgagtggcatcagcttctcactgctgtgggcggatgtcttggatagatcacgggctggctgagctggactttggtcagcctaggtgagactcacctgtccttctggggtcttactcctcctcaaggagtctgtagtggaaaggaggccacagaataagctgcttattctgaaacttcagcttcctctagcccggccctctctaagggagccctctgcactcgtgtgcaggctctgaccaggcagaacaggcaagaggggagggaaggagacccctgcaggctccctccacccaccttgagacctgggaggactcagtttctccacagccttctccagcctgtgtgatacaagtttgatcccaggaacttgagttctaagcagtgctcgtgaaaaaaaaaagcagaaagaattagaaataaataaaaactaagcacttctggagacat

SEQ ID NO: 46 - DNA, 3640 bp, human
gtgcagaaggccgcgctagccggctcttcagcagcgagtgcagattgctcccccgcggccgcagatctcccgtttgcgccgcgttcagctgctcccgaacaacttttctgccggcccagaggccccagggcgtcgcagcgccgcgtgcggcccactcacgggccggcaggatggactccaacactgctccgctgggcccctcctgcccacagcccccgccagcaccgcagccccaggcgcgttcccgactcaatgccacagcctcgttggagcaggagaggagcgaaaggccccgagcacccggaccccaggctggccctggccctggtgttagagacgcagcggcccccgctgaaccccaggcccagcataccaggagccgggaaagagcagacggcaccgggcctacaaagggagacatggaaatcccctttgaagaagtcctggagagggccaaggccggggaccccaaggcacagactgaggtggggaagcactacctgcagttggccggcgacacggatgaagaactcaacagctgcaccgctgtggactggctggtcctcgccgcgaagcagggccgtcgcgaggctgtgaagctgcttcgccggtgcttggcggacagaagaggcatcacgtccgagaacgaacgggaggtgaggcagctctcctccgagaccgacctggagagggccgtgcgcaaggcagccctggtcatgtactggaagctcaaccccaagaagaagaagcaggtggccgtggcggagctgctggagaatgtcggccaggtcaacgagcacgatggaggggcgcagccaggccccgtgcccaagtccctgcagaagcagaggcggatgctggagcgcctggtcagcagcgagtccaagaactacatcgcgctggatgactttgtggagatcactaagaagtacgccaagggcgtcatccccagcagcctgttcctgcaggacgacgaagatgatgacgagctggcggggaagagccctgaggacctgccactgcgtctgaaggtggtcaagtaccccctgcacgccatcatggagatcaaggagtacctgattgacatggcctccagggcaggcatgcactggctgtccaccatcatccccacgcaccacatcaacgcgctcatcttcttcttcatcatcagcaacctcaccatcgacttcttcgccttcttcatcccgctggtcatcttctacctgtccttcatctccatggtgatctgcaccctcaaggtgttccaggacagcaaggcctgggagaacttccgcaccctcaccgacctgctgctgcgcttcgagcccaacctggatgtggagcaggccgaggttaacttcggctggaaccacctggagccctatgcccatttcctgctctctgtcttcttcgtcatcttctccttccccatcgccagcaaggactgcatcccctgctcggagctggctgtcatcaccggcttctttaccgtgaccagctacctgagcctgagcacccatgcagagccctacacgcgcagggccctggccaccgaggtcaccgccggcctgctatcgctgctgccctccatgcccttgaattggccctacctgaaggtccttggccagaccttcatcaccgtgcctgtcggccacctggtcgtcctcaatgtcagcgtcccgtgcctgctctatgtctacctgctctatctcttcttccgcatggcacagctgaggaatttcaagggcacctactgctaccttgtgccctacctggtgtgcttcatgtggtgtgagctctccgtggtcatcctgctggagtccaccggcctggggctgctccgcgcctccatcggctacttcctcttcctctttgccctccccatcctggtggccggcctggccctggtgggcgtgctgcagttcgcccggtggttcacgtctctggagctcaccaagatcgcagtcaccgtggcggtctgtagtgtgcccctgctgttgcgctggtggaccaaggccagcttctctgtggtggggatggtgaagtccctgacgcggagctccatggtcaagctcatcctggtgtggctcacggccatcgtgctgttctgctggttctatgtgtaccgctcagagggcatgaaggtctacaactccacactgacctggcagcagtatggtgcgctgtgcgggccacgcgcctggaaggagaccaacatggcgcgcacccagatcctctgcagccacctggagggccacagggtcacgtggaccggccgcttcaagtacgtccgcgtgactgacatcgacaacagcgccgagtctgccatcaacatgctcccgttcttcatcggcgactggatgcgctgcctctacggcgaggcctaccctgcctgcagccctggcaacacctccacggccgaggaggagctctgtcgccttaagctgctggccaagcacccctgccacatcaagaagttcgaccgctacaagtttgagattaccgtgggcatgccattcagcagcggcgctgacggctcgcgcagccgcgaggaggacgacgtcaccaaggacatcgtgctgcgggccagcagcgagttcaagagcgtgctgctcagcctgcgccagggcagcctcatcgagttcagcaccatcctggagggccgcctgggcagcaagtggcctgtcttcgagctcaaggccatcagctgcctcaactgcatggcccagctctcacccaccaggcggcacgtgaagatcgagcacgactggcgcagcaccgtgcatggcgccgtgaagttcgccttcgacttctttttcttcccattcctgtcggcggcctgaggatggtccgccacgaggagcttccagtgcatgttgccatgaggcctttccccagtgtggccccagcccgacaggcatgcaccagtgccgcctgtgcccacgtgtgcagactgtggctgcagagaccttgcgaccatgtgtagattgcgtggaccccgacaaagggaaggctgctgtgtagctctgtccactctgaataccaagtgtgttgggaattgcatgccatctccaccctgagcctgacctttctgagtgacatgggtgtgccaggctagactaggaggttccggtgtctggaaaagcactttacagatgagattccctctcctcccccaccttcaagcaccctgttccctctttctttcttttgtgttggatttgtttaaaaaccaaataagcatctgtgtaacctccacagtagcatttcttatttgtttggtcactgctacaccttagcagctcttcccctttcctgggggatgtgcacggcagcttgagcctgtcacgtggtcaaggcccggccccatcagaggctgggggaggcggcacattggcagtgtgtcacactgagctgggcaccacaggctgcctcatgaccctcctgtccagcaggtagtgggtgaatgtgtgaaggtcttgcctgaatccatcaggacttgggaaacagagaaccctgtgggggcggctgtgggggaggtccctgccagtgtttagaagagcctgactgtgttcagtgccttggagcagaaagccagggtcctgagtggctgaaataaaagcctctggtggaacctgca

SEQ ID NO: 47 - DNA, 588 bp, human
ttttttttatcaccaagaacttattttaatggaaatgggtctaatgtcccttcatgcaacaagacagatgaacaaaaaacaatggtcctaattagctatgagtgatcttgtatccaggtggaaacaaagggcatgtgtacatgtatatatctcttagatgaaatcacacatgttgtgaagggtagaaaaacgaagcaccaagcagtgctttagtctgcaaaggaaagtttttagccataggcattgtgggctaagccgttccccttgatgttgccaaggagcagatgtatgaggtggcaagtctgtgtctatctagctgcttttaaaaaataaaaggaactttaagcattttgccttttcttctacatatcccaatagaaatgtgactacaaatcattacaaaaccactttttaggcaatgtatagttcactgagattacttagatctggatacactgggagataatatccaggaaagataatacattaacacaataatgcagtatatttcagtaaaaatagaataaataaaataaaaatattttaagctgtatttaacaggttaattaaaaatatggtaagacatag

SEQ ID NO: 48 - DNA, 6740 bp, human
cccagttgtctgcgggctgcggggagctaagtccccagattggaggaggctggctctggtcttcgatgcacaggagtggccgttatggaacgcagcagcagcgtgcagggtcaaagacagccggccccccatgtcagtggtctaggatggccagtgaaggcaccaacatcccaagtcctgtggtgcgccagattgacaagcagtttctgatttgcagtatatgcctggaacggtacaagaatcccaaggttctcccctgtctgcacactttctgcgagaggtgcctgcagaactacattcctgcccacagtttaaccctctcctgcccagtgtgccgccagacctccatcctgcccgagaaaggggtggccgcgctccagaacaatttcttcatcacaaacctgatggacgtgctgcagcgaactccaggcagcaacgctgaggagtcttccatcctggagacagtcactgctgtggctgcgggaaagcctctctcttgcccaaaccacgatgggaatgtgatggaattttactgccagtcctgtgagactgccatgtgtcgggagtgcacggagggggagcacgcagagcaccccacagttccactcaaggatgtggtggaacagcacaaggcctcgctccaggtccagctggatgctgtcaacaaaaggctcccagaaatagattctgctcttcagttcatctctgaaatcattcatcagttaaccaaccaaaaggccagcatcgtggatgacattcattccacctttgatgagctccagaagactttaaatgtgcgcaagagtgtgctgcttatggaattggaggtcaactatggcctcaaacacaaagtcctccagtcgcagctggatactctgctccaggggcaggagagcattaagagctgcagcaacttcacagcgcaggccctcaaccatggcacggagaccgaggtcctactggtgaagaagcagatgagcgagaagctgaacgagctggccgaccaggacttccccttgcacccgcgggagaacgaccagctggatttcatcgtggaaaccgaggggctgaagaagtccatccacaacctcgggacgatcttaaccaccaacgccgttgcctcagagacagtggccacgggcgaggggctgcggcagaccatcatcgggcagcccatgtccgtcaccatcaccaccaaggacaaagacggtgagctgtgcaaaaccggcaacgcctacctcaccgccgaactgagcacccccgacgggagcgtggcagacggggagatcctggacaacaagaacggcacctatgagtttttgtacactgtccagaaggaaggggactttaccctgtctctgagactctatgaccagcacatccgaggcagcccgtttaagctgaaagtgatccgatccgctgatgtgtctcccaccacagaaggcgtgaagaggcgcgttaagtccccggggagcggccacgtcaagcagaaagctgtgaaaagacccgcaagcatgtacagcactggaaaacgaaaagagaatcccatcgaagacgatttgatctttcgagtgggtaccaaaggaagaaataaaggagagtttacaaatcttcagggggtagctgcatctacaaatggaaagatattaattgcagacagtaacaaccaatgtgtgcagatattttccaatgatggccagttcaaaagtcgttttggcatacggggacgctctccggggcagctgcagcggcccacaggagtggctgtacatcccagtggggacataatcattgccgattatgataataaatgggtcagcattttctcctccgatgggaaatttaagacaaaaattggatcaggaaagctgatgggacccaaaggagtttctgtggaccgcaatgggcacattattgttgtggacaacaaggcgtgctgcgtgtttatcttccagccaaacgggaaaatagtcaccaggtttggtagccgaggaaatggggacaggcagtttgcaggtccccattttgcagctgtaaatagcaataatgagattattattacagatttccataatcattctgtcaaggtgtttaatcaggaaggagaattcatgttgaagtttggctcaaatggagaaggaaatgggcagtttaatgctccaacaggtgtagcagtggattcaaatggaaacatcattgtggccgactggggaaacagcaggatccaggtttttgatgggagtggatcatttttgtcctacattaacacatctgctgacccactctatggcccccaaggcctggccctaacttcagatggtcatgttgtggttgcagactctggaaatcactgtttcaaagtctatcgatacttacagtaatggtgggcaggtggatacccgcttccatggtcttgcactataaactggaatggatttctcaatgcgggaccagattatgactagagtttttatgccagaaggaatcattggtgaactttccaaggttatttctgaatgtaacaatttccttaaaaatgacttatccaatttctgtatttcacctttagggttaaaaaaaactcttctactgaatctataaaaactgcagttttacatctgtgaactatggcttaagggacaggatttatgtagctaaactaattttgcaaatcaaacagacacttaaaaaaactagcatatgtaaaggtattcgttaatcctgtgaatggtagcttttgcacagaacttccaaaagcaaaacaaaaacaaaatctattgtagttatatacttcatttaacctaggtcacaagacccagggaatcttctaacctcacttttacagtaggtattactcttgtgacatttttttggttatcaacaactaaatataaattactttggaaaaagtaaggctgtcttgcaaaatgatcccagctctgattagcagccctctggagttcagaacttaagtatcagtgcaaatttctcaacctttctgggttagacaaagatccttttttgtgtgttcttttcaccacccctttggctcaccttgtatcagcaaacaaagtacttcttcagggaaacctgaaatttctaatgccttgaaaagcatattacaaaagtaatgctaccttttgggaaacaaactgccccgttaactccagatcattgcactggaatgtaatcaagaaagttagtcatgttttatgtaccatgttttcacacgtgtctcttctcttcgacttcctgaaagcgaaagctttacctcctgcaaatgtcagcacatgtagtaggacaccagtatcctaggacagagagccataagtagccctttggaggactgatggtgtcaaccaaaggcatgtgattgattaatgattcccccttagaaagcaagtgttaccaaagttgtgttatcttgaaagcattacaggtaagggcatgttatggttatttatcattgtttaatgaatagtagaggtgtcaagggactatgtatacatgattagggtaagatagaatgtattatatatatatatatatatacacacacacatatatatagctgaatctttggtgtattgaaataggcagcactctgaaagacagaagcttcgtccagccactcttcagcacattcctttactaagcagtttaaagccgtcctagtggagcaagccctaaagcagatttaatttttgccattttccaagaatgacggtggtggcttttagtcagaaaatggccttctgtgctttcaaaaaaaaaacaaaaaaaaaaccacacacacacataaaaaacccaacaggtcaaaataaaagttgaacttgagttacatttaatttaaatataaatgcattttgagaaatgttaagaacaatttagtcaatcgttcatctgtcattggtactgtaaaataagctgtggtctatttccactgtttaattttctactcagttctaccaaataggatgtcatgtttgacatttttgatagtgactttggggtcttcttcactgaaagcaccttagaactgtactataagaaaacatttcccctatgtataattatatgaatgtgatgtttattgcttattaatttataattcagtcattctctatataggacttcttaaaatttagaagggaaatctagctacttcaaattgtctgttaaatttattatgcccaaatcaacctctgaaaaaaggtttttccaggaagatttacatttaggtttaatatttttttagttaggtagagttttaaaaaatacttgagcctgtccgtgataaagctataaaattcaataactttttagaatgttaaatgaagacactgtttcctaacatcagtgagatacatctttgaatttaaacattcatatttactgagtacctactaggtaccaagtactcttttaggcactggaaatacagtgatggacaaaacaggtaaaaaatcgctgccccctcagagctgacattctggggtgggaatttcattttgccacgtactaacgttctgcacaaaagacaggctagactcttgtctagattgtttaaaagaaacttttcaaattggttacattaattttagtttattttcacaagtaaaaatggctttttatttagattctttctgtcccaggctgttgatcttaaaactagttgatttaaagagtttttttgcacaacatttcaattatatttgtgaacttagaaattaacttacaatctaaccagccatcatatcatatcctatcaggctagatatctcaatagtagactgaatacaaagctaattttttttacatgtcaatattggcacaaactggaatgaaagaatagtttgattcagacctgctccactatgtgttgctaaaacacatgctatgagcactcgaggaaacactatattttttccaaaaaatatgtgattatatatgttaaagtatagataacatttcacacttggatacatatgtgcatttactgtatttcttggtaagcatatttttgggggaaagtgctgctgatatgatacaagtagacaaaatttaaatgaaattttgtcacattctatggaaaatggtttctggtaaactgagaaggatattaaaataagtggcttttttctgggctaccattattgtttgatttctctttgtcaagtgtatagaacctgtcatacattcatgataagtagcactgaaaaattactcattcaaatttcccctgggcacgtaaggcaaaatattgccggttgggatttcaaggtcagtgacgacgcatttcctcccagtacagaccccccagccccccttgctggacatggggaggcagagagtcacttgaccatccagaaatacatgactacaagtcctttatgactgtttgccattttttttaatggtacttagtattttgatcaaactttagtctccagaactaaacaagtccctaagtttccttattttaatttactgtgactagatttgaagcaaataaatactccagatccatgcagctagaacacacttgcttccactactaaatatacagggtatgtcctaacatggagttaactggaatagcagtacactagcaagtatctgtgaatccttagcactgacgggttaacagaaatgctttggtaatacctacttagttaattggaggaagtagtaaataaacattaggtaatctgcagattacttcaaatgggaaaaatctttttgtagactctatagtaccctctctattcactagcttctgaaaagggaggagtatttttagtttgacaatttaataatttaaaaacaagacatctccaggtaggaaaaaatgaaagctatttcatgcaaacattatctaatttagcttaaaagtgaaagtggtaatactgttggtttctgtaaatgttgcagggttttaaactttataattactttaatatttttgataactagaaatctagtattgccataaaggaaactaagtgcccatcaaagatttgtttggtataaataaagaattatttgttttgttttcaatgacagtaagctacaaatcatgatgcttaaaaactttctaaagatgaattgtgtggcagtgattggtctgtttgtggagaatgtatgaaagctattaatattctagaatagattaataaattggctatgttgttccaatgaatgtacagcacttccattaacttttgaaagcaacacagccttaaactcaatgcttttgctttatgacatgggaatgttctgtcatcaatggagtgtattcttgtaatagaattctttatatcgttctcaattctatagactttcaagcctatgtatgaatatgaaggggtttttttttttttgctttgttttctttttagattttgtacattccatctttataggtctgtttcatatgttttatgtatagaacactaagtcttgcactctctgacattgatactgatatattctcgtcatttgttcttttatgaatcaaaatgttgactgcctatttaaagaaaagaatgaacgctgtgcatcaaagtgtttgtatgttcgtagctacatacgtaccacagtattttggatgctttagtctacaatgaaactttcaattaattctgtcttgaaacataggagaaacaggattcatgtgtatctctttaccatgcacaaaatctcaaatcattataataaagcttgttttctccatttgc

SEQ ID NO: 49 - DNA, 3151 bp, human
ccggccagcgggcgggctccccagccaggccgctgcacctgtcaggggaacaagctggaggagcaggaccctagacctctgcagcccataccaggtctcatggaggggaacaagctggaggagcaggactctagccctccacagtccactccagggctcatgaaggggaacaagcgtgaggagcaggggctgggccccgaacctgcggcgccccagcagcccacggcggaggaggaggccctgatcgagttccaccgctcctaccgagagctcttcgagttcttctgcaacaacaccaccatccacggcgccatccgcctggtgtgctcccagcacaaccgcatgaagacggccttctgggcagtgctgtggctctgcacctttggcatgatgtactggcaattcggcctgcttttcggagagtacttcagctaccccgtcagcctcaacatcaacctcaactcggacaagctcgtcttccccgcagtgaccatctgcaccctcaatccctacaggtacccggaaattaaagaggagctggaggagctggaccgcatcacagagcagacgctctttgacctgtacaaatacagctccttcaccactctcgtggccggctcccgcagccgtcgcgacctgcgggggactctgccgcaccccttgcagcgcctgagggtcccgcccccgcctcacggggcccgtcgagcccgtagcgtggcctccagcttgcgggacaacaacccccaggtggactggaaggactggaagatcggcttccagctgtgcaaccagaacaaatcggactgcttctaccagacatactcatcaggggtggatgcggtgagggagtggtaccgcttccactacatcaacatcctgtcgaggctgccagagactctgccatccctggaggaggacacgctgggcaacttcatcttcgcctgccgcttcaaccaggtctcctgcaaccaggcgaattactctcacttccaccacccgatgtatggaaactgctatactttcaatgacaagaacaactccaacctctggatgtcttccatgcctggaatcaacaacggtctgtccctgatgctgcgcgcagagcagaatgacttcattcccctgctgtccacagtgactggggcccgggtaatggtgcacgggcaggatgaacctgcctttatggatgatggtggctttaacttgcggcctggcgtggagacctccatcagcatgaggaaggaaaccctggacagacttgggggcgattatggcgactgcaccaagaatggcagtgatgttcctgttgagaacctttacccttcaaagtacacacagcaggtgtgtattcactcctgcttccaggagagcatgatcaaggagtgtggctgtgcctacatcttctatccgcggccccagaacgtggagtactgtgactacagaaagcacagttcctgggggtactgctactataagctccaggttgacttctcctcagaccacctgggctgtttcaccaagtgccggaagccatgcagcgtgaccagctaccagctctctgctggttactcacgatggccctcggtgacatcccaggaatgggtcttccagatgctatcgcgacagaacaattacaccgtcaacaacaagagaaatggagtggccaaagtcaacatcttcttcaaggagctgaactacaaaaccaattctgagtctccctctgtcacgatggtcaccctcctgtccaacctgggcagccagtggagcctgtggttcggctcctcggtgttgtctgtggtggagatggctgagctcgtctttgacctgctggtcatcatgttcctcatgctgctccgaaggttccgaagccgatactggtctccaggccgagggggcaggggtgctcaggaggtagcctccaccctggcatcctcccctccttcccacttctgcccccaccccatgtctctgtccttgtcccagccaggccctgctccctctccagccttgacagcccctccccctgcctatgccaccctgggcccccgcccatctccagggggctctgcaggggccagttcctccacctgtcctctgggggggccctgagagggaaggagaggtttctcacaccaaggcagatgctcctctggtgggagggtgctggccctggcaagattgaaggatgtgcagggcttcctctcagagccgcccaaactgccgttgatgtgtggaggggaagcaagatgggtaagggctcaggaagttgctccaagaacagtagctgatgaagctgcccagaagtgccttggctccagccctgtaccccttggtactgcctctgaacactctggtttccccacccaactgcggctaagtctctttttcccttggatcagccaagcgaaacttggagctttgacaaggaactttcctaagaaaccgctgataaccaggacaaaacacaaccaagggtacacgcaggcatgcacgggtttcctgcccagcgacggcttaagccagcccccgactggcctggccacactgctctccagtagcacagatgtctgctcctcctcttgaacttgggtgggaaaccccacccaaaagccccctttgttacttaggcaattccccttccctgactcccgagggctagggctagagcagacccgggtaagtaaaggcagacccagggctcctctagcctcatacccgtgccctcacagagccatgccccggcacctctgccctgtgtctttcatacctctacatgtctgcttgagatatttcctcagcctgaaagtttccccaaccatctgccagagaactcctatgcatcccttagaaccctgctcagacaccattacttttgtgaacgcttctgccacatcttgtcttccccaaaattgatcactccgccttctcctgggctcccgtagcacactataacatctgctggagtgttgctgttgcaccatactttcttgtacatttgtgtctcccttcccaactagactgtaagtgccttgcggtcagggactgaatcttgcccgtttatgtatgctccatgtctagcccatcatcctgcttggagcaagtaggcaggagctcaataaatgtttgttgcatgaaaaaaaaaaaaaaaaaa

SEQ ID NO: 50 - DNA, 1991 bp, human
gtctggaatcaagcgaaccatcaaagaaaccgaccctgattacgaggatgtatctgtggcccttccaaataagcggcataaagcaattgagaattcagctcgagatgctgctgtgcagaagattgagactattatcaaagaacagtttgctcttgaaatgaagaataaggaacatgaaattgaagtcattgaccagcgactgattgaagcaagaaggatgatggataaactgcgtgcctgcattgtagcaaactactatgcttctgcaggtcttctaaaagtttctgagggatcaaagacatgtgatacgatggtttttaatcatcctgctatcaagaaatttttggaatcaccatctaggtcatcatctcctgccaatcagagagcagaaacaccatcagccaatcattcagaaagtgattctttatctcagcacaatgacttcttatctgacaaagataataacagcaatatggatatagaggaaagactctcaaacaacatggagcagagaccaagccgaaatactggaagggatacttctagaattactggctcccataaaacagaacagcggaatgctgatctcacagatgagacttcacgactttttgtaaagaaaacaatagtagtgggcaatgtgtccaagtatatacctccggataagagggaagaaaatgaccagtcaactcataagtggatggtatatgtccgagggtcccgtagagaacccagcattaatcattttgtcaagaaggtttggttcttccttcatcctagctataaaccaaatgaccttgtggaagttagagagcctccttttcacctgaccagaagaggctggggtgagtttcccgtcagagttcaagttcattttaaggacagccagctcaaaccactcagcgtaaacacatctggaggggtgcagacgatcctgatgcctgtgaataaagtggttcagtcattttctaccagcaagccacctgccattctgcctgtagctgccccaactccagttgtccccagctctgctccagcagctgttgcaaaagtgaagactgaaccagaaacacctggaccgagttgcctctctcaggagggtcagacagcagtgaaaacagaagaaagttctgagctgggaaactatgtcattaagatagaccatttagaaactatccagcaactcctaacttagtaaagaagattccattaatcactgcaaaaagtgaagatgccagctgcttttctgcaaagtctgtggagcagtactatggctggaacattggaaaaaggagagccgctgagtggcaaagagcaatgacaatgcgaaaagtcttacaagaaatcctggagaagaatccgagatttcaccacctgactcccctcaaaaccaagcacatcgctcactggtgccgctgtcatggctacaccccaccggaccctgagagcctgaggaatgacggggactccatcgaggacgtgctgacccagatcgacagcgagcccgagtgcccatcatcattctcctctgctgacaacctctgccgcaaactggaggacctgcaacagttccagccctggtgacagaggagaccccgtctcaaaaattgattgatcaattcagcatctgagggctgcaagtacagaaggaatctattctcagcagggcatagggcacgcactggcttaacagtttagtatataaggctcaaatagtctatacctgaactgctataagcaaggtcgatagggaagtggatagattgcttcagcaaagtgaactgtgagatctccaggacagagggagaaagatctgatccaaatgagaacagattggttattgcaggtatcacagcctaaagaaattatctttttgcaaaagaaatattaaatgatttagcagtctccacgtgtgttaatgtttcaaacgtgtatcataatgtgtataattgtgtaacaaaattgtctacaataaatcttttggtatttgt

SEQ ID NO: 51 - DNA, 5285 bp, human
gatgtcttggacatgctctggctggctaatctccatgttctagccgactgaaaatacggtggccaagtggatggtgtgcttatttgcagtctaaagaaatttccttttgatgtggcagaaaatcgaggatgtggagtggagaccccagacttacttggagctggagggtctgccttgcatcctgatcttcagtgggatggacccgcatggggagtccttgccgaggtctttgaggtactgtgacctgcgattgataaactcctcctgcttggtgagaacagccttggagcaggagctgggcctggctgcctactttgtgagcaacgaggttcccttggagaagggggctaggaacgaggccttggagagtgatgctgagaagctgagcagcacagacaacgaggatgaggagctggggacagaaggctctacctcggagaagagaagccccatgaaaagggagaggtcccgctcccacgactcagcatcctcatccctctcctccaaggcttccggttcagcgctcggtggcgagtcctcggctcagcccacagcactcccccagggagagcatgccaggtcgccccagccccgtggccccgcagaggagggcagagcccctggtgagaaacagaggccccgggcaagtcaggggccaccctcggccatcagcaggcacagtcccgggccgacgccccagcccgactgtagcctcaggaccggccagaggagcgtccaggtgtcggtcacctcgtcgtgctcccagctgtcctcctcctcgggctcatcctcctcatccgtggcgcccgctgccggcacgtgggtcctgcaggcctcccagtgctccttgaccaaggcctgccgccagccacccattgtcttcttgcccaagctcgtgtacgacatggttgtgtccactgacagcagtggcctgcccaaggccgcctccctcctgccctccccctcggtcatgtgggccagctctttccgccccctgctcagcaagaccatgacatccaccgagcagtccctctactaccggcagtggacggtgccccggcccagccacatggactacggcaaccgggccgagggccgcgtggacggcttccacccccgcaggctgctgctcagcggcccccctcagatcgggaagacaggtgcctacctgcagttcctcagtgtcctgtccaggatgcttgttcggctcacagaagtggatgtctatgacgaggaggagatcaatatcaacctcagagaagaatctgactggcattatctccagcttagcgacccctggccagacctggagctgttcaagaagttgccctttgactacatcattcacgacccgaagtatgaagatgccagcctgatttgttcgcactatcagggtataaagagtgaagacagagggatgtcccggaagccggaggacctttatgtgcggcgtcagacggcacggatgagactgtccaagtacgcagcgtacaacacttaccaccactgtgagcagtgccaccagtacatgggcttccacccccgctaccagctgtatgagtccaccctgcacgcctttgccttctcttactccatgctaggagaggagatccagctgcacttcatcatccccaagtccaaggagcaccactttgtcttcagccaacctggaggccagctggagagcatgcgactacccctcgtgacagacaagagccatgaatatataaaaagtccgacattcactccaaccaccggccgtcacgaacatgggctctttaatctgtaccacgcaatggacggtgccagccatttgcacgtgctggttgtcaaggaatacgagatggcaatttataagaaatattggcccaaccacatcatgctggtgctccccagtatcttcaacagtgctggagttggtgctgctcatttcctcatcaaggagctgtcctaccataacctggagctcgagcggaaccggcaggaggagctgggaatcaagccgcaggacatctggcctttcattgtgatctctgatgactcctgcgtgatgtggaacgtggtggatgtcaactctgctggggagagaagcagggagttctcctggtcggaaaggaacgtgtctttgaagcacatcatgcagcacatcgaggcggcccccgacatcatgcactacgccctgctgggcctgcggaagtggtccagcaagacccgggccagcgaggtgcaagagcccttctcccgctgccacgtgcacaacttcatcatcctgaacgtggacctgacccagaacgtgcagtacaaccagaaccggttcctgtgtgacgatgtagacttcaacctgcgggtgcacagcgccggcctcctgctctgccggttcaaccgcttcagcgtgatgaagaagcagatcgtggtgggcggccacaggtccttccacatcacatccaaggtgtctgataactctgccgcggtcgtgccggcccagtacatctgtgccccggacagcaagcacacgttcctcgcagcgcccgcccagctcctgctggagaagttcctgcagcaccacagccacctcttcttcccgctgtccctgaagaaccatgaccacccagtgctgtctgtcgactgttacctgaacctgggatctcagatttctgtttgctatgtgagctccaggccccactctttaaacatcagctgctcggacttgctgttcagtgggctgctgctgtacctctgtgactcttttgtgggagctagctttttgaaaaagtttcattttctgaaaggtgcgacgttgtgtgtcatctgtcaggaccggagctcactgcgccagacggtcgtccgcctggagctcgaggacgagtggcagttccggctgcgcgatgagttccagaccgccaatgccagggaagaccggccgctcttttttctgacgggacgacacatctgaggaagacagcggcgagttttctgaagagatgagtgctcagagccctcatgctgttgaggctaaagggaggcctggaacggtggggcgtttgactggaatggaccccagggactgtccaggtgcagcccctcctagtacacatgggcccccgaggccgtggtcctgggagccaggaagactccgcagtgggtgagaatgaaaacttgagactcccaagttctgggccagcccattgctctgggctgttttaaagcccatttcacgaggaacaaagatttacttcctgtcctgccattcgtgtgcttccatggacaaacctgatttttttctcttagttctaaagaatcttgggttattttgtagcggtgccagtatttcagtagatgggatttcagccaagtaggttcccctgtaacctcctacaaagcaatattccaaaggaacattttaactgtaaaggctggagacaagaaaaaataagtagatcgttttaataacaattatttaattgcctataagtttgctgtttcagaggctagcccaaaggcatcaaatttaataaagttaaacaaattgatttacttcagagcaaatatgatcctattaaaataatatagggtaaataccctacctcttagaaagggcaaaaatgcaaagaagctttctttaaaactaaaagggttttttggggggggagttggcggggaggaaataaggctaacagaggttgacctaaaattagccttacaaaggagaaaggaccacattgcttacttgaaacagacaatgaaaacaaccaaagtgatatataaaatagttgatgagaactagacttatgactgtagtttactagagtttagttttcagttgctgaagtagctcattttctcttactaatgtttggttcctcagggaagaatctcacttgactagagaggaggtgggaacagaagagagaaggaggcagggagatgtatttcttagggctcaccccttcacagactgacagaatggttttgttttgttttgttttgttttgttttgtttttgagatggactctagctctgtcacccaggctggagtgcagtggtgcgatctcggctcactgcaagctccgcctcccgggttctcaccattctcctgcctcagcctcccgagtagctgggactacaggcgcccaccaccacgcccggctaattttttgtattttttagtagagacggggtttcaccatgttagccaggatggtctcgatctcctgacctcgtgatccgcccgcctcggcctcccaaagtgctgggattacaggcgtgagccaccgtgcctgccccagaatggtttttaaagccacagttgagaggccacccattgcccggcgcctggacagtgatcatcttgttcatcttgttcagtcctttcttgtgtgattggaattattcatcccctttgaaagatgagaaggttgagatgcaaagagtctacctttccaagttctcactgctggaaagagctagaagcacagttcaaagttctggcttctggactctgcagtccaggtctcccttctcccacttgcctaccctcaatgccacactgtttttgaagtggcccataacttgaaggaaaagtttaaagacagttcaatttaatcatcagaatgcattcttttttttttcggagacggagtttcactcttgctgcccaggctggagtgcaatggtgcaatgatctcggctcactgcaacctctgcctcctgggttcaagtgattctccagcctcagcctcccgagtagctgggattatgggcgcccaccaccatgcccagctaatttttgtattttttttttttagtagagatggggtttcgccaggttggccaggctggtcttgtgaactcctggcctcaggtgatctgcccacctcatcctccaaaagtgctgggattacaggcatgagccactgcgcctggcctcagaatgcattcttacacatctatcctagacatttataagcactctaatggataacaatccaagaataaatgattgtaaaagatgatgccgaagagttgatgtcaatctttttttcctaagaaaaaaagtccgcgagtattaaatatttagatcaatgtttataaaatgattactttgtatatctcattattcctattttggaataaaaactgaccttctttaatcatatacttgtcttttgtaaatagcagcttttgtgtcattctccccactttattagttaatttaaattggaaaaaaccctcaaactaatattcttgtctgttccagtcttataaataaaacttataatgcatg

SEQ ID NO: 52 - DNA, 2412 bp, human
ggcacgaggagccgctctgcgccccgcgccctgcttgcccccattatccagccttgccccggcgccctgacctgacgccctggcctgacgccctgcttcgtcgcctcctttctctcccaggtgctggaccagggactgagcgtcccccggagagggtccggtgtgaccccgacaagaagcagaaatggggaagaaactggatctttccaagctcactgatgaagaggcccagcatgtcttggaagttgttcaacgagattttgacctccgaaggaaagaagaggaacggctagaggcgttgaagggcaagattaagaaggaaagctccaagagggagctgctttccgacactgcccatctgaacgagacccactgcgcccgctgcctgcagccctaccagctgcttgtgaatagcaaaaggcagtgcctggaatgtggcctcttcacctgcaaaagctgtggccgcgtccacccggaggagcagggctggatctgtgacccctgccatctggccagagtcgtgaagatcggctcactggagtggtactatgagcatgtgaaagcccgcttcaagaggttcggaagtgccaaggtcatccggtccctccacgggcggctgcagggtggagctgggcctgaactgatatctgaagagagaagtggagacagcgaccagacagatgaggatggagaacctggctcagaggcccaggcccaggcccagccctttggcagcaaaaaaaagcgcctcctctccgtccacgacttcgacttcgagggagactcagatgactccactcagcctcaaggtcactccctgcacctgtcctcagtccctgaggccagggacagcccacagtccctcacagatgagtcctgctcagagaaggcagcccctcacaaggctgagggcctggaggaggctgatactggggcctctgggtgccactcccatccggaagagcagccgaccagcatctcaccttccagacacggcgccctggctgagctctgcccgcctggaggctcccacaggatggccctggggactgctgctgcactcgggtcgaatgtcatcaggaatgagcagctgcccctgcagtacttggccgatgtggacacctctgatgaggaaagcatccgggctcacgtgatggcctcccaccattccaagcggagaggccgggcgtcttctgagagtcagatctttgagctgaataagcatatttcagctgtggaatgcctgctgacctacctggagaacacagttgtgcctcccttggccaagggtctaggtgctggagtgcgcacggaggccgatgtagaggaggaggccctgaggaggaagctggaggagctgaccagcaacgtcagtgaccaggagacctcgtccgaggaggaggaagccaaggacgaaaaggcagagcccaacagggacaaatcagttgggcctctcccccaggcggacccggaggtgggcacggctgcccatcaaaccaacagacaggaaaaaagcccccaggaccctggggaccccgtccagtacaacaggaccacagatgaggagctgtcagagctggaggacagagtggcagtgacggcctcagaagtccagcaggcagagagcgaggtttcagacattgaatccaggattgcagccctgagggccgcagggctcacggtgaagccctcgggaaagccccggaggaagtcaaacctcccgatatttctccctcgagtggctgggaaacttggcaagagaccagaggacccaaatgcagacccttcaagtgaggccaaggcaatggctgtgccctatcttctgagaagaaagttcagtaattccctgaaaagtcaaggtaaagatgatgattcttttgatcggaaatcagtgtaccgaggctcgctgacacagagaaaccccaacgcgaggaaaggaatggccagccacaccttcgcgaaacctgtggtggcccaccagtcctaacgggacaggacagagagacagagcagccctgcactgttttccctccaccacagccatcctgtccctcattggctctgtgctttccactatacacagtcaccgtcccaatgagaaacaagaaggagcaccctccacatggactcccacctgcaagtggacagcgacattcagtcctgcactgctcacctgggtttactgatgactcctggctgccccaccatcctctctgatctgtgagaaacagctaagctgctgtgacttccctttaggacaatgttgtgtaaatctttgaaggacacaccgaagacctttatactgtgatcttttacccctttcactcttggctttcttatgttgctttcatgaatggaatggaaaaaagatgactcagttaaggcaccaaaaaaaaaaaaaaaaaaaaaaaa

SEQ ID NO: 53 - DNA, 789 bp, human
  misc_feature (14)..(14): n is a, c, g, or t
ctcggaagcccgtnaccatgtcgtgcgagttgtctatggttctcgggtactgggatattcgtgggctggcgcacgccatccgcctgctcctggagttcacggatacctcttatgaggagaaacggtacacgtgcggggaagctcctgactatgatcgaagccaatggctggatgtgaaattcaagctagacctggactttcctaatctgccctacctcctggatgggaagaacaagatcacccagagcaatgccatcttgcgctacatcgctcgcaagcacaacatgtgtggtgagactgaagaagaaaagattcgagtggacatcatagagaaccaagtgatggatttccgcacacaactgataaggctctgttacagctctgaccacgaaaaactgaagcctcagtacttggaagagctacctggacaactgaaacaattctccatgtttctggggaaattctcatggtttgccggggaaaagctcacctttgtggattttctcacctatgatatcttggatcagaaccgtatatttgaccccaagtgcctggatgagttcccaaacctgaaggctttcatgtgccgttttgaggctttggagaaaatcgctgcctacttacagtctgatcagttctgcaagatgcccatcaacaacaagatggcccagtggggcaacaagcctgtwtgctgagcaggaggcagacttgcagagcttgttttgtttcatcctgtccgtaaggggtcagcgctcttgctttgctcttttcaatgaatagcacttatgt

SEQ ID NO: 54 - DNA, 8743 bp, human
acctccgcacgagacccagcggcccgggttggagcgtccagccctgcagcggatcatggtgcagcaggcggagagcttggaagcggagagcaacctgccccgggaggcgctggacacggaggagggcgaattcatggcttgcagcccggtggccctggacgagagcgacccagactggtgcaagacggcgtcgggccacatcaagcggccgatgaacgcgttcatggtatggtccaagatcgaacgcaggaagatcatggagcagtctccggacatgcacaacgccgagatctccaagaggctgggcaagcgctggaaaatgctgaaggacagcgagaagatcccgttcatccgggaggcggagcggctgcggctcaagcacatggccgactaccccgactacaagtaccggccccggaaaaagcccaaaatggacccctcggccaagcccagcgccagccagagcccagagaagagcgcggccggcggcggcggcgggagcgcgggcggaggcgcgggcggtgccaagacctccaagggctccagcaagaaatgcggcaagctcaaggcccccgcggccgcgggcgccaaggcgggcgcgggcaaggcggcccagtccggggactacgggggcgcgggcgacgactacgtgctgggcagcctgcgcgtgagcggctcgggcggcggcggcgcgggcaagacggtcaagtgcgtgtttctggatgaggacgacgacgacgacgacgacgacgacgagctgcagctgcagatcaaacaggagccggacgaggaggacgaggaaccaccgcaccagcagctcctgcagccgccggggcagcagccgtcgcagctgctgagacgctacaacgtcgccaaagtgcccgccagccctacgctgagcagctcggcggagtcccccgagggagcgagcctctacgacgaggtgcgggccggcgcgacctcgggcgccgggggcggcagccgcctctactacagcttcaagaacatcaccaagcagcacccgccgccgctcgcgcagcccgcgctgtcgcccgcgtcctcgcgctcggtgtccacctcctcgtccagcagcagcggcagcagcagcggcagcagcggcgaggacgccgacgacctgatgttcgacctgagcttgaatttctctcaaagcgcgcacagcgccagcgagcagcagctggggggcggcgcggcggccgggaacctgtccctgtcgctggtggataaggatttggattcgttcagcgagggcagcctgggctcccacttcgagttccccgactactgcacgccggagctgagcgagatgatcgcgggggactggctggaggcgaacttctccgacctggtgttcacatattgaaaggcgcccgctgctcgctctttctctcggagggtgcagagctgggttccttgggaggaagttgtagtggtgatgatgatgatgatgataatgatgatgatgatggtggtgttgatggtggcggtggtagggtggaggggagagaagaagatgctgatgatattgataagatgtcgtgacgcaaagaaattggaaaacatgatgaaaattttggtggagttaaagtgaaatgagtagtttttaaacatttttcctgtcctttttttgtcccccctcccttcctttatcgtgtctcaaggtagttgcatacctagtctggagttgtgattattttcccaaaaaatgtgtttttgtaattactatttctttttcctgaaattcgtgattgcaacaaaggcagagggggcggggcgggggaggggaggtaggacccgctccggaaggcgctgtttgaagcttgtcggtctttgaagtctggaagacgtctgcagaggacccttttggcagcacaactgttactctagggagttggtggagatatttttttttcttaagagaacttaaagaactggtgatttttttttaacaaaaaaagggaccattgcaacttttgttaatttaatttttttttttttttttttttttttttttttggagggagaaaactgatgtcttctatgcatccgattcttaacaaaactgcagggagcttgaaaaaatgcagactgtacaaacgcttacaaaaaaaaaaaaactgtgaactgacttaagatcagagtttacttttcagatcaaattgtttatggttttacaaatgtgatttctacttgccaactttttttttgtaacttgttcccttatacctccttgattgaataccagacagcctagacctcagtacaaaaggtattgaaacatttttgatacataacagacctcagtcttttttaaaaattaatatattttcaggcgtatttttgtacagtgaaaagggaacattcttgctgtgttttttcagtaagactttcaggcacttcttcccttttgatttcttttttttcctctgttttttagcatgcaagtatgttggtacgttatgtcctggtttaaaaaggattaaaattttaaaataatccttgcatctaaaggccttgtggtttaaaaaaaaaaaagcaaacttttttttgtacagctatagtagagatttgttcaatatttgtaggtaaagatttattgaaaatggtgatatagacctcagagctgttatcttagtttaaagattgtatatgtactgtactatagtaggactttatgtatctcatacgctgtgatgtggatggggccccagatggaaggtttgaaactggattctcgatttttagcaaaaaagaaaaaaaaaaaggcacatagtttaaaaagtttctcattttgtgcaatataatctaaataaagtacagaccatctgcatattttgtagcaaatggtggcaaagcagactcaatgcactgtcgacatcattgcctgttttttttttttttttttttgtgctggaagtctgtatcttgacaattttaataaatcagctggaactgatagaaactcgcatcgccaatagtctctatggaagtcaaactggaggtcctgttgtcgcagagcattcggtggtgaggctgttgtgtgcgcggatgaggggaggtggcaggagagaattctacatttagggggttaggctgaaaagtgttcaattagcaggctgatttctttttcctcttccgctagttgtgaaagacaggggaagggtgttctttctctctgccctccctttccatctccagctccccatttcctttctcacctcctcctccactccctgcctcttctccccacccatcctggcgggcgggctgcgcggaggctcgggagctggccggggaggggcggatggaggggcctgggttgccagctcccttggtcggggtcctgctcgctggggcttgtgtgttctctgcggcgggccgcgtccccgctgagcctcgcggtgacagccgcctttggcagcgagcgctcggggcacttctatccccgcctctcaaagggtggggacagccgtttccagatttgaattttttctgttctttatttttaacgctgcatcttcgcgtgtgctcagaggtggttgttggcggagaacgccgccgcagtgtttgacctctagcggtgaagggggaaggggaagaggaaaggagagaagtggtcggtgtctgtttccttctgtcccccggggccgtggagctgtcggagggaaggaggacggtgcggggccgcagggggcgcggggcgcggcgggacccaggctacgagcgggagggaggcgggagtcgggggaagacgcggcaggccggccgagggcaccccgaggaacatggcatggcctctgtgcgatccgagtcgcggtctccggggtgcctgggagggccgaaccactggtgagggcgtggggagcagggggtggcagagggcacccgggcggtagtccgggacgcgcaaggcagagccctgacgctccgggtccccgtgcctggctcttcttgcctcgccaccgcgtgctcctgggcgcgccccgccgcgggcccttgaggcgcgcggagacaccagcgctggcttcccgggcccgcgggccggggagggaagcctcggggctgcggggtgagaggaagaaagcaaacccggggagcaggcggctgccgcacccgcgcaccccgggccctcaccacgccctccccgcgcgccggctcaggggctgccccggaatcagctccccggggccgccgcaacgaaggtggatccgcatcttgattgttctccgggagcctcctgggggctccggcggcggcgcgggcgcgacccatcccgctggcgctccccgctcgctgaaccccgtttgcctgtccacaccccctcgctccccaccatttttcctgaccggcctgtgtccccgagccctcgcggcaggcccgagcaggcgatcgcggccgggcacgcgcgccccgggctcccgccccccttccgagcatccgccgcctcttttctgctgggtctgggaggagggaggctgggaggccgctcggggcccagcgtgccagccccggagttcagcctcccgagctgcggcgcccgcagcggaggaggttttcagtggctgattgaaactcactgcaaaatcaccacgactctttcacctactgagatgattgaccgaggtttggccttccatttttactgagatttggcgagaccgaatggaaccgtccgcaaagtaactgcagctgctaggccagaggggccccggcgcccttcccgcctcccctcccgcttgcttttgccttactcgatcttaccaccacccctcccccggccccccgactgagaactcgggcctctcacccgccccccagcctcccgctctgggcgagcctcctccccagcccccacccctgggatgcgaagccagcaagcttttgctgcagatggacaggtttcttttctgtggctttttcctttcgataaaccatcagatttcagtagtacatttgggaaaagaaggggctgatggcgttaaccaggttctcaatatagaactggatttctggagttgtttaccttaccccacaccccctcaacatgtagactaatgcagccattggtggtacatttattttaaccacggataattgaaccagcggtttacaattgacacgtgctccgtgctggtgattttatgtggcagcctctgctgcagttccgaaacttggtggcaacgtaaacccattgataggctgatctatgtattttgaaagcctgaaaacttggcatgtcttttctgttttaatcatagatgaatcttggacattttctgtggtgaggtggaaactttaagtaaattagtaaagtaataatttggcttcagaatgggaagagatagtcaagattttttttttttaaagccatgtggcctaacttgatacaaaaataaaagtaattgtttggcaatctaaatttaaaacctgttagaactcaggacaggcgcttcaatgcgctttttaacaatatttaaggctgttttgatgagtgcgttgtgagaatcatcttaatgaattctttattgagtgtctaaaacatagtataatacacatggtattcttgccactggatagtcttcaataaaagtttaattgatttttttttgttggtctcttaagtaagtcttatttttaactaagcattgacagaatatcttaaaatggtaacctgggggtggcgggtgggtgctgtgtgcacggcagcctagccagtggggatcctgctgtttattataagtagttcacagactctgatggcattttggtaagctttccatctttaagaaattgaaccagcattctcttattaattctttaaactgtggaagtaatttccagttcttacactctgatacgcatcccttttatttaaaaaaaaaaaaaatgctaataaaaggcagtgtacttaaactgtgctttgcaaatattgtgtatgttatgaatgactacagacactgggcaaattatttgtagaatgattatcctttagctagagaaagaaatcattacaactcttttgggcagagatgtttctttttaatgttaatcaaggggaagtgatttaaatatgcataaatgtagcagtcagggtgatttagttgcttttttcatgaaagaaaaagactcaaaagacaagacttatttttctcttctgggacttgaaatcataatcatctgatattagtacagtacaagaaatttacatttggtttttacttcagaatttaagtgacttttgcccaaggaatttgagaaataaggcaaataagttgctctattttaaagtagtcattcaatataaatatattatatcaatcttaacttttttattctctgatatgattaataatatgtatattcttacttttcttctaatgggcatatgtatccttgtggacactttgagagaggttttcttggactctcccatttatagaatctttatactcttttactgtgtggttccctgcttttaacagatttctgaggcaaatatatttgtgcttttttcttatgtaggaagaccagcgaaaatagtttactgagttgtcaattttatcagtagataagaaactttctttattacagtttcagggaagattttttcaggatatttctcagttattctaagggccaaattttgtaaaatttccattaggaatgtcagtttcaaataccctttgtatagcctaagcctgtgaggataacaagaatgagccttacctatcctaacacagggatttacaagttcccaaagtaaccgtctccatgtaactcttgacatacttttctgagatttggcttatttttattattggttatttctcactgttcattctatttgatttattctacaacatccccttttatttaatgatctggaaaattctgctctttgataacaactcaggatttttttgtcagttttggtttttgccccttcctgtggagcctacattttcaaccacaataaagatgaaacaaaatttatgaaactgagctctcttccattttacttactgctggcttttttttttttttttttccttgattcctaccataccttcgtttttttcattgtacttttttaacactacctatatccattagctgcctaattagttttatctgttccatgtggatgcagtgagtttataagagaatttcacaaacaagtagttttttagtgaacttaaaataaacagaattttaaaggagacctatttttatactcaataaaagcacaaaagtgcagaaagtataaaacggcttacaaagggagacacaagctcataatgttccatgtataaaagtaataactttattgggtagagatattcttacaagatctagcacctctgccagtgcacagataggactgttttaaatgatttgggaacttttggttgcctgcagttgtgaacagagaacttctctacagagaaacaaaccactaaaagcaatatgaccgagttgagatgtggtttccaatgagcaattggtgaatttaagcaacctggatgtgcatatgtggaggctcccgtctcactgtttgatcaaacttcttttatgtagtcacgtagacttgattttttctgctgtgaaaatgaaaaaataaagcaatatgacaaaaagtttaaaaatgcataaaaaataggatttcctctaggctcctcgaagagatttttttaatatgatgcttgtcttactttcttagacacgttacatttccccttccaaaaaaaaaaaaaaaggacaactggaagtaatttatcatataaagaattttgatcaaatagatattgacaaagggccctctgtcacatttttcttcatccagcttttgttcaaaaacagtatgcctcctcccttgaatcacatagggagaaacgttatactccattctcattaatttcccattttgtctacttttactcttgtacatatgttgtgggtttaagagtcttttgcatttgttctgtgacacctttttttgaattgactgttttaaaaccgaggcctattttttccggtttgggactcctagtggttatggcatcccataatgcttcgtgacggccaccaggacagaaccacctgatgttttagagcagttttcagcatgacactgttaacaagtgtgtattttccaaggccacatgaaacttactttcttagccactccaggtttgggagcagaaaagctgaaaaacccttttgtgtagaagtctgagtggtttgtgggggggaccttttttagagtttgcatgccagcgcacggcctattgctgtgaaacagagagaaggtaaagctacctgaggcagtgcgctggaggatgaagtgtttgatagcactaggggggaaagaaaatgcatggcaaagtttcgtcttctcgtagactatctagcatgcagagtgtagtgtgttgaaacggtgtatgacattgctgtatcaaagttgtaaaattaagcattatttattgaaaactatgtatttttttgtaaaaacctgatcacatagagaatatcagtggcttgtgcttgtgcttcgatctaaccagcttcttgacccacccccccttggtatgcagtgttaatgctcagggttgaaaatagtacactccaatgtctcttttgcaagagtttttcacagaggattacatttgttcaaaagactctaataaaattgtgtgatcaatcttcaaaaaaaaaaaaaaaaaaa

SEQ ID NO: 55 - DNA, 490 bp, human
aaacaatttgtatttatagaaagagcctcacagaggtggtttatgtacagaagtgacaatctcaaaggttgctcagtagggcattgcagtagcaccttttcgagaagaagagagcttacatggtttaaaattctgagtagttgagtggggtgctcccctggccggcccccgagcccgcctggccctgctccctgagtctggggccgcgtgcggcgtcccgctggctcctgtcgccctagggggcacccgcggcttggaggtggcctctcgggggtcggggacacgaggacaggaattcacagcaagcgaacgcccggggcatgccatggcctccccgccgggctgagggtcgcctgagcggccagctgtcctagaagggggctccgggccggccctgcacctgcaggaggctctccacgaaggccacgtaatcctggctccgcccggagtcctccgtggcaagcggggtgcccacacgcgggcgcttggc

SEQ ID NO: 56 - DNA, 1048 bp, human
cggagctgctctgccgcggggactgcaccgcccgccctgccagacccgcccggaacggggctcgtcgccgccagtagccgcagcaccgcagccttgggcctcgcgccggctatggccgtgccctggggctgagccctcaggttgtgaccgagattcccgacgagagagactgaggggaagagaggaaggaggggcgggctcctggcaaggcattcgctcctgagcggaatcctgcaaagatggagaaggaggaggagacaacccgggagctgctgctgcccaactggcagggtagtggctcccacgggctgaccatcgcccagagggacgacggcgtctttgtgcaggaggtgacgcagaactcccctgcggcccgcactggggtggtcaaggagggggaccagattgtgggtgccaccatctactttgacaacctgcagtcgggtgaggtgacccagctgctgaacaccatggggcaccacacggtgggcctgaagctgcaccgcaagggggaccgctctcccgagcctggccagacctggacccgtgaagtcttcagctcctgcagctctgaagtggttctgaacacaccacagccatcagcactggaatgcaaagaccagaacaaacagaaggaagccagcagccaagccggggcagtttcagtctccaccccaaatgcaggactgtagaagcggccaggaagaaaaccaccccctcttaaggttgtttttgtgaccgttctttggagcattgttctaaaaatgggaaattacatattgctgtgccaagggcaacaaacacctgcagttaaaggaataccttccgcgaggcggcttttcggagcatgcatgtttatagctccagccaggccagaccgagggctgctgcataagccctgcttggtgcatttcttcacttgcaaggggacagagtgtgggcttaggtttgggactagagggggctttggcaactatggtgctcaggtgattatccttcgctcgtttatccaataaacatttatcaagcatctgaaaaaaaaaaaaaa

SEQ ID NO: 57 - DNA, 2882 bp, human
tagaagcaggcaagttgggtaacggctctcggcaaagttcgagaagtgcctatggccatgagtgagctgggcactcggaagcccagcgatggcactgtttctcatctgctcaatgtggtggagagtgagcttcaggcagggagggaaaaaggcgaccctacggagaagcaacttcagatcatcctggaggatgcacctctctggcagagattcaaggaagtcactaatgagatgattgtgaccaagaatggcagacggatgtttccagtcctaaagattagtgtcacagggttggaccccaatgccatgtactccctcctgctggactttgtccctacggacagtcaccgctggaagtacgtcaacggggaatgggtgcccgctggcaagccagaggtctccagccacagctgcgtctacattcacccggactcccccaactttggggcccactggatgaaagctcccatctccttcagcaaagtgaagctgaccaacaagctcaatggaggcgggcagataatgttgaattctctgcataaatatgaaccccaggttcacatagtgcgtgttggaagtgcccatcgaatggtaacaaactgctccttccctgaaacccagttcatagccgtgactgcctatcagaatgaggagataacggctctcaaaatcaagtacaatccttttgccaaagccttcttggatgccaaggaaagaaatcacctaagagacgtaccggaggctatctctgagagccagcatgtgacctattctcacttgggaggctggatcttttccaatccagatggagtgtgcacagcaggaaactccaattaccagtatgccgctcctctgcctctgcctgctccccacacccaccatggctgtgagcactattcgggtctccgaggacaccggcaggctccctacccttctgcgtacatgcacagaaaccattctccctcagtgaatttgatagaaagctcaagcaataatctgcaagttttctcgggacctgacagctggacttccttatcctccacaccccatgccagcatcctgtctgtaccccacaccaacggaccaatcaatccagggcccagcccctacccgtgcctgtggaccatcagcaatggtgccggaggccccagtgggccaggcccggaggtgcacgccagcaccccaggagcatttctcctcggaaacccagctgtgacttcacccccttctgtgctctccacccaagcacccacttcggctggtgtggaggttctgggggagccctcgctaaccagcattgctgtgtccacctggacagcagtggcctcgcatcccttcgcgggctggggtggcccaggagcgggtgggcaccattctccttcctcactggatggttaagcaggatcctaggagcctctttgcacagcgatccttccatgtgtagagtgcttagaaaccccatcaactgatctagtgagtcagactgtggaatctcccttcccactagctggaggtggaggtgggttattacagaagtcatactgggagagggttcagtttggatgatgctagttagatcatttgcatctctccaccattttcttctgcactcccattttctctgcagcttattcttgccatgcttaggtgacagaagtttgttaagtaccatccttgtgccctgcctcttattctcaaatcgttctggaaagcctcacttccttttctgtggagaaggtgcaaagctgttaaatgagctcagagtttacctagctaaggccactgcttcctgctttgtgaagcctggaaagtatgtgtggccacagggctcaggttcacacttctgctttgagaccaggatggggtgtaagccatagagtaaggttaacaaaaagaataaagctaatcatgtattacaaacagcagtgtgcccagacttgtggaaatgaagtcatgtcactcctctgctcagaaaccttcaatggttcaccattaccagtggaatgaagtcaattctcctcactataactgggtgtggtagtttaagcctataatctcagcccttttggaggccaaggtaagaggatcgcttgaggtcaggagttcgagaccagcttgtgcaacaaagtgagagcctgtctctacaaaaaatagtcatgcacacaaaattagctgggcatggtggcctgtgcctatagtcccaactacttagaggaggatcgcttgatctcaggaggttgaggctgcagtgaattatgattgtggcattgcactccagcctgggtggtagatcaaggctttgtttcatttgaaaaaaaagaaagaaagaaagaaagaaaggaatcctactacgagcgatcacaccatctggcctgaaaccacttccccagcttaggtccctctgttatcctgttggcctcctatgtattggtcaaggcaggcatctctgttctctgaacattcattgcactttcccacctctataccttgcctgtgccttagtgtcctcttttttccagttcacctgtgcgaatccgacccacctcccagagcctggctgaaacgtcactccctgcatccaacatctgatctgctgagatatgtctgatctatctctgctcgctgttctcccgttgtttttgcctctgccatagagctcacctcattttgccttgtatttttgttacctgtgagtgtgtctctccctattagactgtaagcctctcgagggtgaggcctagccttcttgtctttgtaacccacagcagctggtactgtgccttgcctattgtaggtgcccaataaacatttgctgaactgaaaaaaaaaaaaaaaaaaaaaaaaaaaaaaaaaaaaaaaaaaaaaaaaaaaaaaaaaaaaaa

SEQ ID NO: 58 - DNA, 662 bp, human
accgccgacgcagacccctctctgcacgccagcccgcccgcacccaccatggccacagttcagcagctggaaggaagatggcgcctggtggacagcaaaggctttgatgaatacatgaaggagctaggagtgggaatagctttgcgaaaaatgggcgcaatggccaagccagattgtatcatcacttgtgatggtaaaaacctcaccataaaaactgagagcactttgaaaacaacacagttttcttgtaccctgggagagaagtttgaagaaaccacagctgatggcagaaaaactcagactgtctgcaactttacagatggtgcattggttcagcatcaggagtgggatgggaaggaaagcacaataacaagaaaattgaaagatgggaaattagtggtggagtgtgtcatgaacaatgtcacctgtactcggatctatgaaaaagtagaataaaaattccatcatcactttggacaggagttaattaagagaatgaccaagctcagttcaatgagcaaatctccatactgtttctttcttttttttttcattactgtgttcaattatctttatcataaacattttacatgcagctatttcaaagtgtgttggattaattaggatcatccctttggttaataaataaatgtgtttgtgct

SEQ ID NO: 59 - DNA, 2937 bp, human
caatttcagagtgggatatcagatctttagtgtgaagatacatctacattaaaccaggaatcactagaactgacatttggacaagaaaatttggaaaattttaaaactgtgaaggttgatcatggaaattaaagaggaaggggcatcagaagaagggcagcactttcttcctacagcccaggccaatgatcccggggactgtcagttcacaagtatccagaagactccaaatgaaccgcagttggaattcatccttgcatgcaaggatctcgtggctcctgtccgtgatcgtaaactgaatacactggtgcagatctccgtaatccaccccgtggagcagagtctgacaagatactccagcaccgaaattgtggagggaacaagggacccactgtttttgactggtgtcacattcccatctgagtatcccatctatgaggagaccaaaataaaactaacagtctatgatgtcaaggataagtctcatgacaccgttcgaaccagtgtcctaccagaacataaggatcccccgccagaagttggccgaagtttcttgggctatgccagttttaaagtgggagagctgctgaagtcaaaggagcaattgctggtcctgagcctgagaacttcagatggtggcaaagtggttggcaccatagaagtcagtgtcgtgaagatgggggagattgaggatggggaagccgaccacatcaccacagatgtacagggacaaaagtgtgccctggtatgtgaatgtacagccccggaaagtgtgagcggaaaagataacttaccttttttgaattcagtgttaaagaacccagtatgtaaattatatagatttcccacatctgacaataagtggatgcgaattcgagagcagatgtcagagagcattctttcctttcatattcctaaggaattgatttcccttcacattaaagaagatttgtgcagaaaccaggagataaaagaacttggtgagctttctccacattgggacaatctgcgaaaaaatgtccttacgcactgtgatcaaatggtgaatatgttccaagacattctgacagaacttgccaaggaaacagggtcctctttcaaatcaagcagcagcaaaggagagaaaacattagaatttgttccaataaatctacatctgcaaagaatgcaggtacacagccctcacttgaaagatgctctctacgatgtcatcactgtgggagccccagctgcccattttcagggatttaagaatggtggtcttcggaagctactccatagatttgaaacagaaagaagaaataccggataccagtttatttactattcacctgaaaacacagccaaagcaaaggaagttctcagcaacatcaatcaactacaacctcttatagcaacccatgcagacctactgcttaattctgcaagccagcattctccagacagcttgaagaattctttaaagatgctttcagaaaaaacagagctttttgtacatgccttcaaggatcaacttgtcaggagtgctcttttagcactctacactgcaaggccaggaggcattcttaagaagccaccctctcctaagagcagcacagaggagagcagtccccaagaccaacccccagtgatgagagggcaggactccataccacatcattcagactatgatgaggaagagtgggacagggtgtgggccaatgtggggaagagcctgaactgcattattgctatggtggacaaactgattgaaagagatggtggcagtgaaggcagtggtggcaacaatgatggagaaaaggaaccttcattaacagatgccattccctctcacccaagagaggactggtatgaacagttgtatcccctcatccttaccctgaaggactgcatgggagaagtggtgaaccgagccaagcagtccctgacatttgtgctccttcaggaacttgcgtacagcttgccccagtgtctgatgctgacgctaagaagagacatcgtcttcagccaagcacttgctggattggtttgtggttttatcatcaaattacagacaagtctgtatgacccaggcttcctacagcagcttcacacagtggggttgatagtacaatatgaaggattgttaagtacatacagcgatgaaattggaatgttagaggacatgcccgttggcatttccgatttaaagaaagttgcatttaaaataattgaagccaaatccaatgatgtattgccagttataacaggaagacgagaacattacgtggtagaggtcaagcttccagccagaatgtttgagtcactacctctacagattaaagaaggacagttgcttcatgtgtatccagtactttttaatgttggaatcaatgaacagcaaactctggctgaaaggtttggagatgtctctttgcaagaaagtattaatcaggaaaacttcgaacttctacaagaatattacaagatatttatggaaaagatgcctcctgattatatttcacattttcaggaacaaaatgatttaaaagcattgctagaaaatctccttcaaaatatccaatccaaaaaaagaaagaatgtagaaattatgtggctggctgcaacgatttgccgcaaactgaatggtattcgtttcacctgttgtaaaagtgccaaagacaggacatcgatgtcagtgacacttgaacaatgctcaatcttgagagatgagcaccagttacacaaggacttctttatccgagcgctggattgcatgagaagagaaggatgccgcatagagaatgtactgaagaatatcaaatgcagaaagtatgctttcaacatgctacagctgatggctttccccaagtactacagacctccagaggggacttatggaaaagctgacacctaagtttaccaacatgttaataaacaggaacacaaatacatttc

SEQ ID NO: 60 - DNA, 3171 bp, human
gcggaacaccggcccgccgtcgcggcagctgcttcacccctctctctgcagccatggggctccctcgtggacctctcgcgtctctcctccttctccaggtttgctggctgcagtgcgcggcctccgagccgtgccgggcggtcttcagggaggctgaagtgaccttggaggcgggaggcgcggagcaggagcccggccaggcgctggggaaagtattcatgggctgccctgggcaagagccagctctgtttagcactgataatgatgacttcactgtgcggaatggcgagacagtccaggaaagaaggtcactgaaggaaaggaatccattgaagatcttcccatccaaacgtatcttacgaagacacaagagagattgggtggttgctccaatatctgtccctgaaaatggcaagggtcccttcccccagagactgaatcagctcaagtctaataaagatagagacaccaagattttctacagcatcacggggccgggggcagacagcccccctgagggtgtcttcgctgtagagaaggagacaggctggttgttgttgaataagccactggaccgggaggagattgccaagtatgagctctttggccacgctgtgtcagagaatggtgcctcagtggaggaccccatgaacatctccatcatcgtgaccgaccagaatgaccacaagcccaagtttacccaggacaccttccgagggagtgtcttagagggagtcctaccaggtacttctgtgatgcaggtgacagccacagatgaggatgatgccatctacacctacaatggggtggttgcttactccatccatagccaagaaccaaaggacccacacgacctcatgttcacaattcaccggagcacaggcaccatcagcgtcatctccagtggcctggaccgggaaaaagtccctgagtacacactgaccatccaggccacagacatggatggggacggctccaccaccacggcagtggcagtagtggagatccttgatgccaatgacaatgctcccatgtttgacccccagaagtacgaggcccatgtgcctgagaatgcagtgggccatgaggtgcagaggctgacggtcactgatctggacgcccccaactcaccagcgtggcgtgccacctaccttatcatgggcggtgacgacggggaccattttaccatcaccacccaccctgagagcaaccagggcatcctgacaaccaggaagggtttggattttgaggccaaaaaccagcacaccctgtacgttgaagtgaccaacgaggccccttttgtgctgaagctcccaacctccacagccaccatagtggtccacgtggaggatgtgaatgaggcacctgtgtttgtcccaccctccaaagtcgttgaggtccaggagggcatccccactggggagcctgtgtgtgtctacactgcagaagaccctgacaaggagaatcaaaagatcagctaccgcatcctgagagacccagcagggtggctagccatggacccagacagtgggcaggtcacagctgtgggcaccctcgaccgtgaggatgagcagtttgtgaggaacaacatctatgaagtcatggtcttggccatggacaatggaagccctcccaccactggcacgggaacccttctgctaacactgattgatgtcaacgaccatggcccagtccctgagccccgtcagatcaccatctgcaaccaaagccctgtgcgccacgtgctgaacatcacggacaaggacctgtctccccacacctcccctttccaggcccagctcacagatgactcagacatctactggacggcagaggtcaacgaggaaggtgacacagtggtcttgtccctgaagaagttcctgaagcaggatacatatgacgtgcacctttctctgtctgaccatggcaacaaagagcagctgacggtgatcagggccactgtgtgcgactgccatggccatgtcgaaacctgccctggaccctggaaaggaggtttcatcctccctgtgctgggggctgtcctggctctgctgttcctcctgctggtgctgcttttgttggtgagaaagaagcggaagatcaaggagcccctcctactcccagaagatgacacccgtgacaacgtcttctactatggcgaagaggggggtggcgaagaggaccaggactatgacatcacccagctccaccgaggtctggaggccaggccggaggtggttctccgcaatgacgtggcaccaaccatcatcccgacacccatgtaccgtcctaggccagccaacccagatgaaatcggcaactttataattgagaacctgaaggcggctaacacagaccccacagccccgccctacgacaccctcttggtgttcgactatgagggcagcggctccgacgccgcgtccctgagctccctcacctcctccgcctccgaccaagaccaagattacgattatctgaacgagtggggcagccgcttcaagaagctggcagacatgtacggtggcggggaggacgactaggcggcctgcctgcagggctggggaccaaacgtcaggccacagagcatctccaaggggtctcagttcccccttcagctgaggacttcggagcttgtcaggaagtggccgtagcaacttggcggagacaggctatgagtctgacgttagagtggttgcttccttagcctttcaggatggaggaatgtgggcagtttgacttcagcactgaaaacctctccacctgggccagggttgcctcagaggccaagtttccagaagcctcttacctgccgtaaaatgctcaaccctgtgtcctgggcctgggcctgctgtgactgacctacagtggactttctctctggaatggaaccttcttaggcctcctggtgcaacttaatttttttttttaatgctatcttcaaaacgttagagaaagttcttcaaaagtgcagcccagagctgctgggcccactggccgtcctgcatttctggtttccagaccccaatgcctcccattcggatggatctctgcgtttttatactgagtgtgcctaggttgccccttattttttattttccctgttgcgttgctatagatgaagggtgaggacaatcgtgtatatgtactagaacttttttattaaagaaa

SEQ ID NO: 61 - DNA, 2094 bp, human
gaattccggtccggagtcagtgccgcgcgcccgccgccccgcgccttcctgctcgccgcacctccgggagccggggcgcacccagcccgcagcgccgcctccccgcgcgcgccgcctccgaccgcaggccgagggccgccactggccggggggaccgggcagcagcttgcggccgcggagccgggcaacgctggggactgcgccttttgtccccggaggtccctggaagtttgcggcaggacgcgggcggggaggcggcggaggcagccccgacgtcgcggagaacagggcgcagagccggcatgggcatcgggcgcagcgaggggggccgccgcggggcagccctgggcgtgctgctggcgctgggcgcggcgcttctggccgtgggctcggccagcgagtacgactacgtgagcttccagtcggacatcggcccgtaccagagcgggcgcttctacaccaagccacctcagtgcgtggacatccccgcggacctgcggctgtgccacaacgtgggctacaagaagatggtgctgcccaacctgctggagcacgagaccatggcggaggtgaagcagcaggccagcagctgggtgcccctgctcaacaagaactgccacgccggcacccaggtcttcctctgctcgctcttcgcgcccgtctgcctggaccggcccatctacccgtgtcgctggctctgcgaggccgtgcgcgactcgtgcgagccggtcatgcagttcttcggcttctactggcccgagatgcttaagtgtgacaagttccccgagggggacgtctgcatcgccatgacgccgcccaatcccaccgaagcctccaagccccaaggcacaacggtgtgtcctccctgtgacaacgagttgaaatctgaggccatcattgaacatctctgtgccagcgagtttgcactgaggatgaaaataaaagaagtgaaaaaagaaaatggcgacaagaagattgtccccaagaagaagaagcccctgaagttggggcccatcaagaagaaggacctgaagaagcttgtgctgtacctgaagaatggggctgactgtccctgccaccagctggacaacctcagccaccacttcctcatcatgggccgcaaggtgaagagccagtacttgctgacggccatccacaagtgggacaagaaaaacaaggagttcaaaaacttcatgaagaaaatgaaaaaccatgagtgccccacctttcagtccgtgtttaagtgattctcccgggggcagggtggggagggagcctcgggtggggtgggagcgggggggacagtgccccgggaacccggtgggtcacacacacgcactgcgcctgtcagtagtggacattgtaatccagtcggcttgttcttgcagcattcccgctcccttccctccatagccacgctccaaaccccagggtagccatggccgggtaaagcaagggccatttagattaggaaggtttttaagatccgcaatgtggagcagcagccactgcacaggaggaggtgacaaaccatttccaacagcaacacagccactaaaacacaaaaagggggattgggcggaaagtgagagccagcagcaaaaactacattttgcaacttgttggtgtggatctattggctgatctatgcctttcaactagaaaattctaatgattggcaagtcacgttgttttcaggtccagagtagtttctttctgtctgctttaaatggaaacagactcataccacacttacaattaaggtcaagcccagaaagtgataagtgcagggaggaaaagtgcaagtccattatgtaatagtgacagcaaaggcccaggggagaggcattgccttctctgcccacagtctttccgtgtgattgtctttgaatctgaatcagccagtctcagatgccccaaagtttcggttcctatgagcccggggcatgatctgatccccaagacatgtggaggggcagcctgtgcctgcctttgtgtcagaaaaaggaaaccacagtgagcctgagagagacggcgatcttcgggctgagaaggcagtagttttcaaaacacatagttaaaaaaaaaaagctt

SEQ ID NO: 62 - DNA, 1568 bp, human
caggtctgaattcaaaatggcctcatctcctgctgtccttcgagcgtcccggctgtaccaatggagcctgaagagttcggcgcagttcctggggtctccacagctgaggcaggttggtcagatcattagggttcctgctcggatggcggcgacgctgatcctggagcctgcgggccgctgctgctgggacgaaccggtgcgaatcgccgtgcgcggcctagccccggagcagccggtcacgctgcgcgcgtccctgcgcgacgagaagggcgcgcttttccaggcccacgcgcgctaccgcgccgacactcttggcgagctggacctggagcgcgcgcccgcgctgggcggcagcttcgcggggcttgagcccatggggctgctctgggccttggagcccgagaaacctttggtgcggctggtgaagcgcgacgtgcgaacgcccttggccgtggagctggaggtgctggatggccacgaccccgaccccgggcggctgctgtgccagacgcggcacgagcgctacttcctcccgcccggggtgcggcgcgagccggtgcgcgtgggccgggtgcgaggcacgctcttcctgccgccagaacctgggccctttcctgggattgtggacatgttcggaactggaggtggcctgctggagtatcgggctagtctgctggctgggaagggttttgctgtgatggctctggcttattataactatgaagacctccccaagaccatggagacgctccatctggagtactttgaagaagccatgaactacttgctcagtcatcccgaggtaaaaggtccaggagttgggctgcttggaatttccaaagggggtgagctctgcctttccatggcctctttcctgaagggcatcacggctgctgtcgtcatcaacggctctgtggccaatgttgggggaaccttacgctacaagggcgagaccctgccccctgtgggcgtcaacagaaatcgcatcaaggtgaccaaagatggctatgcagacattgtggatgtcctgaacagccctttggaaggacctgaccagaagagcttcattcctgtggaaagggcagagagcaccttcctgttcctggtaggtcaggatgaccacaactggaagagtgagttctatgctaatgaggcctgtaaacgcttgcaggcccatgggaggagaaagccccagatcatctgttacccagagacagggcactatattgagcctccttacttccccctgtgtcgggcttccctgcatgccttggtgggcagtcctattatctggggaggggagcccagggctcatgccatggctcaggtggatgcttggaaacaactccagactttcttccacaaacacttgggtggccgcgaggggacaatcccatcaaaagtgtaaattttatttgatcatgtggcctctctgttgctaatctctcctggaaacatctgccacatttagtgtgtgtatgtgtattcattcttttgtttttaataactaaagttttttcccctcattattaaaatgaatttaccagtaaaaaaaaaaaaaaaaaaaa

SEQ ID NO: 63 - DNA, 929 bp, human
caaacaaggcccacactggacagggcagctgctgggttgctactctcgcctccgccatgattccgcccgcagactcttttgctcaagtacgacaccccagtgctggtgagccggaacacggagaaacggagccccaaggtcggctactgaaagtcagcccccagcagcctggaccttcaggttcagccccacagccacccaagaccaagctcccctcaactccctgtgtcccagatcctacaaagcaggcagaagaaatcttgaatgccatactacccccaagggagtgggtggaagacacgcagctatggatccagcaggtgtccagcacccctacgcaccaggatggacgtggtgcacctccaggagcagttagacttaaagctgcagcagcggcaggccagggaaacaggcatctgccctgtccgcaggaactctactcacagtgttttgatgagttgatccgggagtcaccatcaactgtgcggagagggggctgctgctgctgcagtcgggacgagatccgcatgaccatcgctgcctaccagaccctgtacgagagcagcgtggcgtttggcatgaggaaggcactgcaggctgagcaggggaagtcagacatggagaggaaaatcgcagaattggagacggaaaagagagacctggagaggcaagtgaacgagcagaaggcaaaatgtgaagccactgagaagcgggagagcgagaggcggcaggtggaggagaagaagcacaatgaggagattcagttcctgaagcgaacaaatcagcagctgaaggcccaactggaaggcattattgcaccaaagaagtgataatttccacatgattaatttccaacaagacacttgggagttatttactgtgttcctctggcagccaataaaatcatcataagccctttgtaataaaaa

SEQ ID NO: 64 - DNA, 3866 bp, human
ggaattcctttttttttttttttgagatggagtttcactcttgttggccaggctggagtgcaatggcacaatctcagcttactgcaacctccgcctcccgggttcaagcgattctcctgcctcagcctctcaagtagctgggattacaggcatgtgccaccacccctggctaactaatttcttttctatttagtagagatggggtttcaccatgttggtcaggctggtcttgaactcctgacctcaggtgatccacttgccttggcctcccaaagtgctaggattacagccgtgaaactgtgcctggctgattctttttttgttgttggatttttgaaacagggtctcccttggtcgcccaggctggagtgcagtggtgcgatcttggctcactataacctccacctcctggtttcaagtgatcctcccactttagcctcctgagtagctgtgattacaggcgtgcaccaccacacccggctaatttttgtatttttattagagacagggtttcaccatgttggccaggctgttctcaaactcctggactcaagggatccgcctgcctccacttcccaaagtcccgagattacaggtgtgagtcaccatgcctgaccttataattcttaagtcattttttctggtccatttcttccttagggtcctcacaacaaatctgcattaggcggtacaataatccttaacttcatgattcacaaaaggaagatgaagtgattcatgatttagaaaggggaagtagtaagcccactgcacactcctggatgatgatcctaaatccagatacagtaaaaatggggtatgggaaggtagaatacaaaatttggtttaaattaattatctaaatatctaaaaacatttttggatacattgttgatgtgaatgtaagactgtacagacttcctagaaaacagtttgggttccatcttttcatttccccagtgcagttttctgtagaaatggaatccgaggatttaagtggcagagaattgacaattgattccataatgaacaaagtgagagacattaaaaataagtttaaaaatgaagaccttactgatgaactaagcttgaataaaatttctgctgatactacagataactcgggaactgttaaccaaattatgatgatggcaaacaacccagaggactggttgagtttgttgctcaaactagagaaaaacagtgttccgctaagtgatgctcttttaaataaattgattggtcgttacagtcaagcaattgaagcgcttcccccagataaatatggccaaaatgagagttttgctagaattcaagtgagatttgctgaattaaaagctattcaagagccagatgatgcacgtgactactttcaaatggccagagcaaactgcaagaaatttgcttttgttcatatatcttttgcacaatttgaactgtcacaaggtaatgtcaaaaaaagtaaacaacttcttcaaaaagctgtagaacgtggagcagtaccactagaaatgctggaaattgccctgcggaatttaaacctccaaaaaaagcagctgctttcagaggaggaaaagaagaatttatcagcatctacggtattaactgcccaagaatcattttccggttcacttgggcatttacagaataggaacaacagttgtgattccagaggacagactactaaagccaggtttttatatggagagaacatgccaccacaagatgcagaaataggttaccggaattcattgagacaaactaacaaaactaaacagtcatgcccatttggaagagtcccagttaaccttctaaatagcccagattgtgatgtgaagacagatgattcagttgtaccttgttttatgaaaagacaaacctctagatcagaatgccgagatttggttgtgcctggatctaaaccaagtggaaatgattcctgtgaattaagaaatttaaagtctgttcaaaatagtcatttcaaggaacctctggtgtcagatgaaaagagttctgaacttattattactgattcaataaccctgaagaataaaacggaatcaagtcttctagctaaattagaagaaactaaagagtatcaagaaccagaggttccagagagtaaccagaaacagtggcaagctaagagaaagtcagagtgtattaaccagaatcctgctgcatcttcaaatcactggcagattccggagttagcccgaaaagttaatacagagcagaaacataccacttttgagcaacctgtcttttcagtttcaaaacagtcaccaccaatatcaacatctaaatggtttgacccaaaatctatttgtaagacaccaagcagcaataccttggatgattacatgagctgttttagaactccagttgtaaagaatgactttccacctgcttgtcagttgtcaacaccttatggccaacctgcctgtttccagcagcaacagcatcaaatacttgccactccacttcaaaatttacaggttttagcatcttcttcagcaaatgaatgcatttcggttaaaggaagaatttattccatattaaagcagataggaagtggaggttcaagcaaggtatttcaggtgttaaatgaaaagaaacagatatatgctataaaatatgtgaacttagaagaagcagataaccaaactcttgatagttaccggaacgaaatagcttatttgaataaactacaacaacacagtgataagatcatccgactttatgattatgaaatcacggaccagtacatctacatggtaatggagtgtggaaatattgatcttaatagttggcttaaaaagaaaaaatccattgatccatgggaacgcaagagttactggaaaaatatgttagaggcagttcacacaatccatcaacatggcattgttcacagtgatcttaaaccagctaactttctgatagttgatggaatgctaaagctaattgattttgggattgcaaaccaaatgcaaccagatacaacaagtgttgttaaagattctcaggttggcacagttaattatatgccaccagaagcaatcaaagatatgtcttcctccagagagaatgggaaatctaagtcaaagataagccccaaaagtgatgtttggtccttaggatgtattttgtactatatgacttacgggaaaacaccatttcagcagataattaatcagatttctaaattacatgccataattgatcctaatcatgaaattgaatttcccgatattccagagaaagatcttcaagatgtgttaaagtgttgtttaaaaagggacccaaaacagaggatatccattcctgagctcctggctcatccatatgttcaaattcaaactcatccagttaaccaaatggccaagggaaccactgaagaaatgaaatatgttctgggccaacttgttggtctgaattctcctaactccattttgaaagctgctaaaactttatatgaacactatagtggtggtgaaagtcataattcttcatcctccaagacttttgaaaaaaaaaggggaaaaaaatgatttgcagttattcgtaatgtcagataggaggtataaaatatattggactgttatactcttgaatccctgtggaaatctacatttgaagacaacatcactctgaagtgttatcagcaaaaaaaattcagtgagattatctttaaaagaaaactgtaaaaatagcaaccacttatggcactgtatatattgtagacttgttttctctgttttatgctcttgtgtaatctacttgacatcattttactcttggaatagtgggtggatagcaagtatattctaaaaaactttgtaaataaagttttgtggctaaaatga

SEQ ID NO: 65 - DNA, 2591 bp, human
cccggacgtgcggctcccctcggcctcctcgccatggacgcggacgactcccgggcccccaagggctccttgcggaagttcctggagcacctctccggggccggcaaggccatcggcgtgctgaccagcggcggggatgctcaaggtatgaacgctgccgtccgtgccgtggtgcgcatgggtatctacgtgggggccaaggtgtacttcatctacgagggctaccagggcatggtggacggaggctcaaacatcgcagaggccgactgggagagtgtctccagcatcctgcaagtgggcgggacgatcattggcagtgcgcggtgccaggccttccgcacgcgggaaggccgcctgaaggctgcttgcaacctgctgcagcgcggcatcaccaacctgtgtgtgatcggcggggacgggagcctcaccggggccaacctcttccggaaggagtggagtgggctgctggaggagctggccaggaacggccagatcgataaggaggccgtgcagaagtacgcctacctcaacgtggtgggcatggtgggctccatcgacaatgatttctgcggcaccgacatgaccatcggcacggactccgccctgcacaggatcatcgaggtcgtcgacgccatcatgaccacggcccagagccaccagaggaccttcgttctggaggtgatgggacgacactgtgggtacctggccctggtgagtgccttggcctgcggtgcggactgggtgttccttccagaatctccaccagaggaaggctgggaggagcagatgtgtgtcaaactctcggagaaccgtgcccggaaaaaaaggctgaatattattattgtggctgaaggagcaattgatacccaaaataaacccatcacctctgagaaaatcaaagagcttgtcgtcacgcagctgggctatgacacacgtgtgaccatcctcgggcacgtgcagagaggagggaccccttcggcattcgacaggatcttggccagccgcatgggagtggaggcagtcatcgccttgctagaggccaccccggacaccccagcttgcgtcgtgtcactgaacgggaaccacgccgtgcgcctgccgctgatggagtgcgtgcagatgactcaggatgtgcagaaggcgatggacgagaggagatttcaagatgcggttcgactccgagggaggagctttgcgggcaacctgaacacctacaagcgacttgccatcaagctgccggatgatcagatcccaaagaccaattgcaacgtagctgtcatcaacgtgggggcacccgcggctgggatgaacgcggccgtacgctcagctgtgcgcgtgggcattgccgacggccacaggatgctcgccatctatgatggctttgacggcttcgccaagggccagatcaaagaaatcggctggacagatgtcgggggctggaccggccaaggaggctccattcttgggacaaaacgcgttctcccggggaagtacttggaagagatcgccacacagatgcgcacgcacagcatcaacgcgctgctgatcatcggtggattcgaggcctacctgggactcctggagctgtcagccgcccgggagaagcacgaggagttctgtgtccccatggtcatggttcccgctactgtgtccaacaatgtgccgggttccgatttcagcatcggggcagacaccgccctgaacactatcaccgacacctgcgaccgcatcaagcagtccgccagcggaaccaagcggcgcgtgttcatcatcgagaccatgggcggctactgtggctacctggccaacatgggggggctcgcggccggagctgatgccgcatacattttcgaagagcccttcgacatcagggatctgcagtccaacgtggagcacctgacggagaaaatgaagaccaccatccagagaggccttgtgctcagaaatgagagctgcagtgaaaactacaccaccgacttcatttaccagctgtattcagaagagggcaaaggcgtgtttgactgcaggaagaacgtgctgggtcacatgcagcagggtggggcaccctctccatttgatagaaactttggaaccaaaatctctgccagagctatggagtggatcactgcaaaactcaaggaggcccggggcagaggaaaaaaatttaccaccgatgattccatttgtgtgctgggaataagcaaaagaaacgttatttttcaacctgtggcagagctgaagaagcaaacggattttgagcacaggattcccaaagaacagtggtggctcaagctacggcccctcatgaaaatcctggccaagtacaaggccagctatgacgtgtcggactcaggccagctggaacatgtgcagccctggagtgtctgacccagtcccgcctgcatgtgcctgcagccaccgtggactgtctgtttttgtaacacttaagttattttatcagcactttatgcacgtattattgacattaatacctaatcggcgagtgcccatctgccccaccagctccagtgcgtgctgtctgtggagtgtgtctcatgctttcagatgtgcatatgagcagaattaattaa

SEQ ID NO: 66 - DNA, 2600 bp, human
ggttaggaagagtggagactgctgcacggactctggaaccatgaacatatttgatcgaaagatcaactttgatgcgcttttaaaattttctcatataaccccgtcaacgcagcagcacctgaagaaggtctatgcaagttttgccctttgtatgtttgtggcggctgcaggggcctatgtccatatggtcactcatttcattcaggctggcctgctgtctgccttgggctccctgatattgatgatttggctgatggcaacacctcatagccatgaaactgaacagaaaagactgggacttcttgctggatttgcattccttacaggagttggcctgggccctgccctggagttttgtattgctgtcaaccccagcatccttcccactgctttcatgggcacagcaatgatctttacctgcttcaccctcagtgcactctatgccaggcgccgtagctacctctttctgggaggtatcttgatgtcagccctgagcttgttgcttttgtcttccctggggaatgttttctttggatccatttggcctttccaggcaaacctgtatgtgggactggtggtcatgtgtggcttcgtccttgttgatactcaactcattattgaaaaggccgaacatggagatcaagattatatctggcactgcattgatctcttcttagatttcattactgtcttcagaaaactcatgatgatcctggccatgaatgaaaaggataagaagaaagagaagaaatgaagtgaccatccagcctttcccaattagacttcctctccttccacccctcatttcctttttgcacacattacaggtggtgtgttctgtgataatgaaaagcatcagaaaagcttttgtactttgtggtttcctctattttgaattttttgatcaaaaaactgattagcagaatatagtttggagtttggcttcatcttcctggggttcccctcactcccttttttgtcaaccccatctgtagcctcttcctctactcaggcagtcgacccgccacgatgagaagtgggaccagccagagggcgccaacttcaggagtccgctttcccaccaggcttcattcacccagtggacctgaactgtttggtagagccacccggcccttccttcctcattgttgtttggtatgcgcacagttcctgtgggactgggccgtgagttttccattggaaagaagttcagtggtcccattgttaactcagcctcaaatctcaactgtcaggccctacaaagaaaatggagagcctcttctggtggatgctttgctccctctgagctgcccatgctggtctggcaaacacacctttctgctttgccttcacaaaagtaatgtgttccctttcccgccccttgcctgaccctcagggagtcagcctgcttccatccatgggtgggaagacttcagcacaaaggaaagactaattcttgtcaggcatttttgaaaaggctgattatgtgtatcaaggtacagctacgtaggttcccctaaacttgccctgtttttgtttttttagtttgttatccccttactgagcggcctctactaggtggctgtgattaaatgtcccaagcaaggatagggaaggggaatggttgagcctctggagatcattgtaaccaatcctgccagacctgtttggggcagtggggagcaaacctagataaggacctgtttggggcagcagggagcaaaatctcctttaacaaccaagcagttcctcattcacatcaacagagcgaggctgtgataacttaggaggcagcaatcctaatagtccttcagtgcattttagtctgtctccaactggacaccagtaggtagtgtcaagccagagattcggggcagtagataaatgttcattttactgatgcactttagtttttggtctgttacctgttttccagaaatttgtggccttttaggcgggagttaggcgaccaaaccagtgagagccccaatccctgcagttttgtggcttcaagtgtgggtggacagtcctaatggggatctccagctccttcctgtgggctgccacagacagctacccccagaagggtcaatgttgggagtggttgtggctctgagctgctctacagagcttcagtgtgagaggatcgagccattgaaagctcattaccagtaggacataatttttggctctccctattcacaaccagtgcacagtttgacagtggcctcaggttcacagtgcaccatgtcactgtgctatcctacgaaatcatttgtttctaagttgtgtttattcctggagtgacatgccaccccgaatggctcactttcactgaggatgctgtcctctgatttagctgctgcctccagcctctggcttgagaacttactaaaggcacttccttcctgttaaacccctgttaactctccataaatttggtgattctctgctaggcctaagattttgagttaacatctcttgaagccaaactccaccttctgtgctttttgcttgggataatggagtttttctttagaaacagtgccaagaatgacaagatattaaaaaaaaaaaaaaaaaaaaaaaaaaaaaaaaaa

SEQ ID NO: 67 - DNA, 3872 bp, human
cgctcgctcgcagagaagccgcggcccatggagcccgccggcccggcccccggccgcctcgggccgctgctctgcctgctgctcgccgcgtcctgcgcctggtcaggagtggcgggtgaggaggagctgcaggtgattcagcctgacaagtccgtgttggttgcagctggagagacagccactctgcgctgcactgcgacctctctgatccctgtggggcccatccagtggttcagaggagctggaccaggccgggaattaatctacaatcaaaaagaaggccacttcccccgggtaacaactgtttcagacctcacaaagagaaacaacatggacttttccatccgcatcggtaacatcaccccagcagatgccggcacctactactgtgtgaagttccggaaagggagccccgatgacgtggagtttaagtctggagcaggcactgagctgtctgtgcgcgccaaaccctctgcccccgtggtatcgggccctgcggcgagggccacacctcagcacacagtgagcttcacctgcgagtcccacggcttctcacccagagacatcaccctgaaatggttcaaaaatgggaatgagctctcagacttccagaccaacgtggaccccgtaggagagagcgtgtcctacagcatccacagcacagccaaggtggtgctgacccgcgaggacgttcactctcaagtcatctgcgaggtggcccacgtcaccttgcagggggaccctcttcgtgggactgccaacttgtctgagaccatccgagttccacccaccttggaggttactcaacagcccgtgagggcagagaaccaggtgaatgtcacctgccaggtgaggaagttctacccccagagactacagctgacctggttggagaatggaaacgtgtcccggacagaaacggcctcaaccgttacagagaacaaggatggtacctacaactggatgagctggctcctggtgaatgtatctgcccacagggatgatgtgaagctcacctgccaggtggagcatgacgggcagccagcggtcagcaaaagccatgacctgaaggtctcagcccacccgaaggagcagggctcaaataccgccgctgagaacactggatctaatgaacggaacatctatattgtggtgggtgtggtgtgcaccttgctggtggccctactgatggcggccctctacctcgtccgaatcagacagaagaaagcccagggctccacttcttctacaaggttgcatgagcccgagaagaatgccagagaaataacacaggacacaaatgatatcacatatgcagacctgaacctgcccaaggggaagaagcctgctccccaggctgcggagcccaacaaccacacggagtatgccagcattcagaccagcccgcagcccgcgtcggaggacaccctcacctatgctgacctggacatggtccacctcaaccggacccccaagcagccggcccccaagcctgagccgtccttctcagagtacgccagcgtccaggtcccgaggaagtgaatgggaccgtggtttgctctagcacccatctctacgcgctttcttgtcccacagggagccgccgtgatgagcacagccaacccagttcccggagggctggggcggtgcaggctctgggacccaggggccagggtggctcttctctccccacccctccttggctctccagcacttcctgggcagccacggccccctccccccacattgccacatacctggaggctgacgttgccaaaccagccagggaaccaacctgggaagtggccagaacttcctggggtccaagaactcttgtgcctccgtccatcaccatgtgggttttgaagaccctcgactgcctccccgatgctccgaagcctgatcttccagggtggggaggagaaaatcccacctcccctgacctccaccacctccaccaccaccaccaccaccaccaccaccactaccaccaccacccaactggggctagagtggggaagatttcccctttagatcaaactgccccttccatggaaaagctggaaaaaaactctggaacccatatccaggcttggtgaggttgctgccaacagtcctggcctcccccatccctaggctaaagagccatgagtcctggaggaggagaggacccctcccaaaggactggagacaaaaccctctgcttccttgggtccctccaagactccctggggcccaactgtgttgctccacccggacccatctctcccttctagacctgagcttgcccctccagctagcactaagcaacatctcgctgtggacgcctgtaaattactgagaaatgtgaaacgtgcaatcttgaaactgaggtgttagaaaacttgatctgtggtgttttgttttgttttttttcttaaaacaacagcaacgtgatcttggctgtctgtcatgtgttgaagtccatggttgggtcttgtgaagtctgaggtttaacagtttgttgtcctggagggattttcttacagcgaagacttgagttcctccaagtcccagaaccccaagaatgggcaagaaggatcaggtcagccactccctggagacacagccttctggctgggactgacttggccatgttctcagctgagccacgcggctggtagtgcagccttctgtgaccccgctgtggtaagtccagcctgcccagggctgctgagggctgcctcttgacagtgcagtcttatcgagacccaacgcctcagtctgctcatccgtaaagtggggatagtgaagatgacacccctccccaccacctctcataagcactttaggaacacacagagggtagggatagtggccctggccgtctatcctacccctttagtgaccgcccccatcccggctttctgagctgatccttgaagaagaaatcttccatttctgctctcaaaccctactgggatcaaactggaataaattgaagacagccagggggatggtgcagctgtgaagctcgggctgattccccctctgtcccagaaggttggccagagggtgtgacccagttaccctttaacccccacccttccagtcgggtgtgagggcctgaccgggcccagggcaagcagatgtcgcaagccctatttattcagtcttcactataactcttagagttgagacgctaatgttcatgactcctggccttgggatgcccaagggatttctggctcaggctgtaaaagtagctgagccatcctgcccattcctggaggtcctacaggtgaaactgcaggagctcagcatagacccagctctctgggggatggtcacctggtgatttcaatgatggcatccaggaattagctgagccaacagaccatgtggacagctttggccagagctcccgtgtggcatctgggagccacagtgacccagccacctggctcaggctagttccaaattccaaaagattggcttgtaaaccttcgtctccctctcttttacccagagacagcacatacgtgtgcacacgcatgcacacacacattcagtattttaaaagaatgttttcttggtgccattttcattttattttattttttaattcttggagggggaaataagggaataaggccaaggaagatgtatagctttagctttagcctggcaacctggagaatccacataccttgtgtattgaaccccaggaaaaggaagaggtcgaaccaaccctgcggaaggagcatggtttcaggagtttattttaagactgctgggaaggaaacaggccccattttgtatatagttgcaacttaaactttttggcttgcaaaatatttttgtaataaagatttctgggtaataaaaaaaaa

SEQ ID NO: 68 - DNA, 539 bp, human
  misc_feature (330)..(330): n is a, c, g, or t
gcaacaaacagtaccaatttattttggccgtgggtttttgctttttttccagttgatgactttgtgaacattcccagatattggagcctctgtggccttaaatgtggctcagtggagggagacccttcatagccaggccagtatggagctctttacgcacagctctcagaagctgcaggcatacgaacatctgaccaaagaggtgtggtcgaggctcccccaggatgtgtgcccggttgtagtaggagctgaaatccatgctgagctgtaccaggaacttgcatatcatctctgtgcgtacagcaatgtggagccccggggctgtgcagnccagcactgctgtccggctcagcagatccggaaaggggaggatactgttgaagagcaacaaccactcacccttatcatgtagcagtgagaagtccagactgcttcacaggaggaaaagtggggtacagaccttgtttcatactacacttgtaactcttaaagagtgtggcaagacgtgcacaattatacatgacaaaggtgccactctt

SEQ ID NO: 69 - DNA, 1916 bp, human
ggcacgagggccggagtcgtcttcgggacgcgcctgctcttcgcctttcgctgcagtccgtcgatttctttctccaggaagaaaaatggcatccgttgcagttgatccacaaccgagtgtggtgactcgggtggtcaacctgcccttggtgagctccacgtatgacctcatgtcctcagcctatctcagtacaaaggaccagtatccctacctgaagtctgtgtgtgagatggcagagaacggtgtgaagaccatcacctccgtggccatgaccagtgctctgcccatcatccagaagctagagccgcaaattgcagttgccaatacctatgcctgtaaggggctagacaggattgaggagagactgcctattctgaatcagccatcaactcagattgttgccaatgccaaaggcgctgtgactggggcaaaagatgctgtgacgactactgtgactggggccaaggattctgtggccagcacgatcacaggggtgatggacaagaccaaaggggcagtgactggcagtgtggagaagaccaagtctgtggtcagtggcagcattaacacagtcttggggagtcggatgatgcagctcgtgagcagtggcgtagaaaatgcactcaccaaatcagagctgttggtagaacagtacctccctctcactgaggaagaactagaaaaagaagcaaaaaaagttgaaggatttgatctggttcagaagccaagttattatgttagactgggatccctgtctaccaagcttcactcccgtgcctaccagcaggctctcagcagggttaaagaagctaagcaaaaaagccaacagaccatttctcagctccattctactgttcacctgattgaatttgccaggaagaatgtgtatagtgccaatcagaaaattcaggatgctcaggataagctctacctctcatgggtagagtggaaaaggagcattggatatgatgatactgatgagtcccactgtgctgagcacattgagtcacgtactcttgcaattgcccgcaacctgactcagcagctccagaccacgtgccacaccctcctgtccaacatccaaggtgtaccacagaacatccaagatcaagccaagcacatgggggtgatggcaggcgacatctactcagtgttccgcaatgctgcctcctttaaagaagtgtctgacagcctcctcacttctagcaaggggcagctgcagaaaatgaaggaatctttagatgacgtgatggattatcttgttaacaacacgcccctcaactggctggtaggtcccttttatcctcagctgactgagtctcagaatgctcaggaccaaggtgcagagatggacaagagcagccaggagacccagcgatctgagcataaaactcattaaacctgcccctatcactagtgcatgctgtggccagacagatgacaccttttgttatgttgaaattaacttgctaggcaaccctaaattgggaagcaagtagctagtataaaggccctcaattgtagttgtttccagctgaattaagagctttaaagtttctggcattagcagatgatttctgttcacctggtaagaaaagaatgataggcttgtcagagcctatagccagaactcagaaaaaattcaaatgcacttatgttctcattctatggccattgtgttgcctctgttactgtttgtattgaataaaaacatcttcatgtgggctggggtagaaactggtgtctgctctggtgtgatctgaaaaggcgtcttcactgctttatctcatgatgcttgcttgtaaaacttgattttagtttttcatttctcaaataggaatactacctttgaattcaataaaattcactgcaggataaataaaaaaaaaaaaaaaaaaaaaaaaaaaaaaaaaaaa

SEQ ID NO: 70 - DNA, 5307 bp, human
ccacgcgcggcgccgctcggtgcagaccatgaattacgtggggcagttagccggccaggtgtttgtcaccgtgaaggagctctacaaggggctgaatcccgccacactctcagggtgcattgacatcattgtcatccgccagcccaatggaaacctccaatgctcccctttccacgtccgctttgggaagatgggggtcctgcgctcccgagagaaagtggttgacatagaaatcaatggggaatctgtggatttgcatatgaaattgggagataatggagaagcattttttgttcaagaaacagataatgatcaggaagttatccctatgcacctggccacctcccccatcctgtcagaaggagcttcgagaatggaatgccagctgaaaaggggctctgtggacaggatgagaggcctggaccccagcacgccagcccaagtgatcgctcccagcgagacgccgtcaagcagctctgtagtaaagaagagaagaaaaaggaggagaaagtcacagctggacagcctgaagagagatgacaacatgaacacatctgaggatgaggacatgttccccatcgagatgagctcggatgaggccatggagctgctggagagcagcagaactcttcctaatgatatacctccattccaagatgatattcctgaggaaaacctctccctggctgtgatttaccctcagtcagcctcataccctaattcggatagagagtggtcacccactcccagtccttccggttcccgaccttcaacacctaaaagtgattcagaattggtcagcaagtccacggaaaggacagggcagaagaacccagaaatgctttggctgtggggagagctgccgcaggctgctaagtcttcttctccacacaagatgaaagagtccagcccattgagcagtagaaaaatttgtgataaaagtcactttcaggccattcacagcgaatcttcagacacttttagtgaccaatcgccaactctggtcggtggggcacttttggaccagaacaagcctcagacagaaatgcagtttgtgaatgaagaagacctggagaccttaggagcagcagcgccactcttgcccatgatcgaggagctcaaacccccctctgccagtgtagtccagacagcaaacaagacggattctccttccaggaaaagagataaacgaagccgacatcttggtgctgacggcgtctacttggatgacctcacagacatggatcctgaagtggcggccctgtattttcccaaaaacggagatccttccggactcgcaaaacatgcaagcgacaacggagcccggtcagccaaccagtccccgcagtcggtgggcagctcgggcgtggacagtggcgtggagagcacctcggacgggctgagggacctcccttccatcgccatctccctctgcgggggcctcagcgaccaccgggagatcacgaaagatgcattcctggagcaagctgtgtcatatcaacagtttgtggacaaccccgctattatcgatgaccccaatctcgtggtaaagattgggagtaaatattataactggacaacagcagcacccctcctcctggcaatgcaggccttccagaaacctttgccaaaggccactgtggaatctatcatgagggataaaatgcccaaaaagggaggaagatggtggttttcatggaggggaagaaacaccacaatcaaggaggaaagtaagccagagcagtgcttggctggcaaggcccatagcaccggagagcaaccgccgcagctcagcttggccaccagggtaaagcatgaatcatcctccagtgatgaggagcgcgcagctgccaagccatcaaacgcaggccacctccctcttctgcctaatgtcagctacaagaagactctccggctgacttccgagcagcttaaaagcttgaagttgaagaatggccccaacgacgtggttttcagtgtcaccacgcagtaccaaggcacgtgccgctgtgagggcaccatctatctgtggaactgggatgataaagtcatcatttctgatattgatgggacaattaccagatcagatactcttggccacattttgcccacccttgggaaggattggacccatcagggcatcgctaagctgtaccataaagtgagccagaatggatataaatttctctactgttctgcccgtgccatcgggatggcggacatgacgcggggctacctgcactgggtcaacgagaggggcacggtgctgccccaggggcccctgctgctgagtcccagcagcctcttctctgccctgcacagagaagtgattgaaaagaagccagaaaagtttaaagtccagtgtttgacagacatcaaaaacctgtttttccccaacacagaacccttttatgctgcttttggaaaccgaccagctgatgtgtattcatacaagcaagtaggagtgtctttgaatagaatatttaccgtcaaccctaaaggagagctggtacaggaacatgcaaagaccaacatctcttcgtatgtgagactctgtgaagtagtcgaccacgttttcccgttgctgaaaagaagccattcttcagactttccctgttcggataccttcagtaacttcaccttttggagagagccactgccaccttttgaaaaccaggacattcattctgcctcagcgtaaaatgtcccaagcagcctcttgccagcagtgcagagcctggttgtcacccattaaaggataggtctccccggagtgcacagctccacctgggagcctggcgcgtcatcattggcctgacagcagagagaattgagaagcatttctcccctgccccaccccggggctgacatttctaagcaagataggaagggagcactttctaggctaggagttgggtgcatttgtaccgtgaaaagcattcctcagttgtggcttaatgccagttacgacgctgcctttccggcctgctccagcaagtagctactggttcacgtgcagtttggggctgtgaaacctaggcagaaggcggctgtctgagggctgtccccgcctaggacagggtcaatcgaggaatgccagatgtgcacggtttttggcaaagtagggggcacatttccattatagcaatgttagtgccaccaccttctgaacacagtggggagggctgtgaaggctcatgtgacctggatctgaggtctctgatagaaatctggacgccaccgggtccaggcctggcctcagacttggccttgtggatgggccccttacagtatttgctgactagtctcatttttaggtgataagtttttctttaattcctttggttaaagatagtctatttcattggcatatctccccccagtttttgtggctcaaggctggaatatttatgccttaatatatctatggcagacatttaagaatgcgctttatctagctcatggtaactttgcaacgccttagattaaaatgacagtaaatattactaaggcagtattttgaatgagtttgacactgccggcttccttccatccagcgaggtggtgctgacagtgtggacttgagcacacttatgccaaatgataatgatactgacttctgttgggagctctccaaagaaactggttggttttaagaaaatagtttcaagaagttcaactatattcttttagatattatgtattgttttactctgattaggttactgtgataggcatttattcatattctttctataccactgtcattaatatattaaaaagatgtatgtgttagactatcgaaagggccttattctctctttctcatagactgaccttcttttggaatttctgagtcatttattttccttagctttttccactcaaattaagggcaagcgaaaaagtaataatttggcattctttaagcctacagaatgtgattctttcacttgtttattacactggctcgtggacagaacaatttgaaaagtgaaagaattattttggtaaaagattttgctttacttttcgaagcattatttttttaaagagtgttttactccaacgattgaaacattttcctatttaaatttcatcgttagaatcacaggaggcaaaaaatggaacggttgaatgaaattttactctttctgtgaaagaaaatccacagagttgttgcctccgttgtagttggtgggccccgttagcattggatgcctttgccaaatggttcatgtggacacacaaaggcaaacagatctgccatcgatcgcagatttctgtagaaacacggatgtgcatgtgcagattcccttttgcaggtattaaaaataattaaaaatagtcctgcctgaggttgcagtgagccgagcttgcactactgcactccagcctgggtgacagagtaagactccatgtcaaaaaaaaaaaaaaaaaaaaaaagtcctgccttaactaactcctctgcgcttgttcactagtaacctaaagaggctatattcattctttatgcaatgagggtatttttgagtgaattttaactgctctgaactaagtataagctcatgggcctgcaaaggttcagacggtttctcctttgcacccaggaggaactttggctgcgagaatggggggatgtatccctcatgcagttggcatccaggcagccctctgcagcagcacaccctgcaggcggagttttcagaggatgcaattttggatcccgaattttgatgtaccttaaacttccacatcactgcaccctgaaacagagcatgctttccagaaagtcacactctcagatctgtgtcaagttcaatgtgagccctggcaaggctggcatattaacacctgccttctggcttctgaaagtgagatttgtatatgggctgcactcacgcatatacgagttggtttatctttgtgtacatgactataacccagtgatgctgaggtcatgtgctggaatgctgtatttggaccacacatttcaaagttgccctatggaaatgaatcctacttagtgacaagtcatcaaatgtttgtcacatgtgatgaagacaaatatgtatacctggcatagagaaaaatatatacctggtacattggagaaaaataattacactttcaaagagaattccctttgcaattttatgtttggatcaccactgtaagcacactttatttgcatttgatctgtatttgtatatgctgatgcaatgataaaaatcactgtaatacttcattgtgttgtactggatgcaaagctagaaaatattgcaataaatgagaccgatgaaagac

SEQ ID NO: 71 - DNA, 1792 bp, human
tgcagatgccctgtgccgtgcagctcagcatgcataggtggggtagttggttgatgagcttttctttaggagaacagattttgagctatctttttttgttggaaccctgcacacaactgtcattatgtagatggttttcctctcaggtggttggttttctccagagaagaacccttgaatctcctgcctgtggaggtggacgtgtggttggtgttctgggtgccccttgccctgagctctgttctccatggtgcctgtttcctgggtctgcagccccttctcagtttctctgaagagtaaacctctcccctgcttggggaggagcatgggggttacgtagtagcctggctgcataacatgggcttagtagctcagttttccatcatgaaccagagcctcatctttcatggttcctgtgcctccgagggctgggctactggggtgtctgtcagtccagatggctttgttctcaagtttcctccacagtggatatgaatgtttgcaacttacactcaattacaacgctttcctctacttttctccaagtttgctgaaatctttatttgtggatatctcctctctttttgctttgtcctcataggttaaaacgttttaaaattccctaacagtaggaaatttagtagggttttggaagggagaggaggtgtaagatggtcactcttccatgtttaactggaagtggaaagtctaggcttttgcttcaggcctgggaggtgcacatgaaacagtccctcccagtggctgcctggggggtccctgaagggtgtgagaccaccgtgaatcctggggcagggcacttgcagtacatgtgctatgtgtttgctagtattgttttagatgtttgatctcctagcctttgcttttctttgtatttttcctgctttagtccatttcccttctagctccttctgttctcatttatcttctgctgctgcttggagttacattttcagcaagtctgtaacacctctctgaaccaaaggctctcaagttcatctttctttctccaagcctacgcctgtgctgctgtcatgagtggcgagcttctgtttcttctgtcttcttgtcagtcccaagtgcccttttacagagaatgcctgtttttcactgtctagctcagttaccaggagtccctgtgaatgacacccacaggtccctcaaagaagtcagatttctcttggacctgataaagcaaacaaaatgtgacccaagcaggctgagttggacgggtcccttcttaccttcgccctctgccatgttgacattcttatctgatggcacaggctgggagttcaggatccacttagatggggtccgttcaggggataccagcgttcacatttttccttttaagaaagggtcttggcctgaatgttccccatccggacacaggctgcatgtctctgtgagtgtcaaagctgccatgaccatctcggtaacctactcttactccacaatgtctatattcactgcagggctctatgattagtccataatgtaaatgcctggcccaagacgtatggcctgagtttatccaaggcccaaacaattaccaaacattcctcttagatagaagacagatttctttcccttggcaaagatcttctactaagatatgttacaggatgttttacattctcttggtcttataataacaccacgcccaatccagtatttgatgcgtcggtggtcactcggaaggttgttattttaaaaatacttattgttctcagtctgcagttctcacagctgtaaaaaaaaaaaaaaaaaa

SEQ ID NO: 72 - DNA, 1044 bp, human
cacgagggcgtccctctgcctgcccactcagtggcaacacccgggagctgttttgtcctttgtggagcctcagcagttccctctttcagaactcactgccaagagccctgaacaggagccaccatgcagtgcttcagcttcattaagaccatgatgatcctcttcaatttgctcatctttctgtgtggtgcagccctgttggcagtgggcatctgggtgtcaatcgatggggcatcctttctgaagatcttcgggccactgtcgtccagtgccatgcagtttgtcaacgtgggctacttcctcatcgcagccggcgttgtggtctttgctcttggtttcctgggctgctatggtgctaagactgagagcaagtgtgccctcgtgacgttcttcttcatcctcctcctcatcttcattgctgaggttgcagctgctgtggtcgccttggtgtacaccacaatggctgagcacttcctgacgttgctggtagtgcctgccatcaagaaagattatggttcccaggaagacttcactcaagtgtggaacaccaccatgaaagggctcaagtgctgtggcttcaccaactatacggattttgaggactcaccctacttcaaagagaacagtgcctttcccccattctgttgcaatgacaacgtcaccaacacagccaatgaaacctgcaccaagcaaaaggctcacgaccaaaaagtagagggttgcttcaatcagcttttgtatgacatccgaactaatgcagtcaccgtgggtggtgtggcagctggaattgggggcctcgagctggctgccatgattgtttccatgtatctgtactgcaatctacaataagtccacttctgcctctgccactactgctgccacatgggaaactgtgaagaggcaccctgggcaagcagcagtgattgggggaggggacaggatctaacaatgtcacttgggccagaatggacctggcctttctgctcccagacttgggggctagattagggaccactccttttaggcgatgcctgactttgcctt

SEQ ID NO: 73 - DNA, 1755 bp, human
cctcggctccggaatcactgcagcccccctcgccctgagccagagcaccccgggtcccgccagcccctcacactcccagcaaaatgggcaaggagaagacccacatcaacatcgtggtcatcggccacgtggactccggaaagtccaccaccacgggccacctcatctacaaatgcggaggtattgacaaaaggaccattgagaagttcgagaaggaggcggctgagatggggaagggatccttcaagtatgcctgggtgctggacaagctgaaggcggagcgtgagcgcggcatcaccatcgacatctccctctggaagttcgagaccaccaagtactacatcaccatcatcgatgcccccggccaccgcgacttcatcaagaacatgatcacgggtacatcccaggcggactgcgcagtgctgatcgtggcggcgggcgtgggcgagttcgaggcgggcatctccaagaatgggcagacgcgggagcatgccctgctggcctacacgctgggtgtgaagcagctcatcgtgggcgtgaacaaaatggactccacagagccggcctacagcgagaagcgctacgacgagatcgtcaaggaagtcagcgcctacatcaagaagatcggctacaacccggccaccgtgccctttgtgcccatctccggctggcacggcgacaacatgctggagccctcccccaacatgccgtggttcaagggctggaaggtggagcgtaaggagggcaacgcaagcggcgtgtccctgctggaggccctggacaccatcctgccccccacgcgccccacggacaagcccctgcgcctgccgctgcaggacgtgtacaagattggcggcattggcacggtgcccgtgggccgggtggagaccggcatcctgcggccgggcatggtggtgacctttgcgccagtgaacatcaccactgaggtgaagtcagtggagatgcaccacgaggctctgagcgaagctctgcccggcgacaacgtcggcttcaatgtgaagaacgtgtcggtgaaggacatccggcggggcaacgtgtgtggggacagcaagtctgacccgccgcaggaggctgctcagttcacctcccaggtcatcatcctgaaccacccggggcagattagcgccggctactccccggtcatcgactgccacacagcccacatcgcctgcaagtttgcggagctgaaggagaagattgaccggcgctctggcaagaagctggaggacaaccccaagtccctgaagtctggagacgcggccatcgtggagatggtgccgggaaagcccatgtgtgtggagagcttctcccagtacccgcctctcggccgcttcgccgtgcgcgacatgaggcagacggtggccgtaggcgtcatcaagaacgtggaaaagaagagcggcggcgccggcaaggtcaccaagtcggcgcagaaggcgcagaaggcgggcaagtgaagcgcgggccgcggcgcgaccctccccggcggcgccgcgctccgaaccccggcccggcccccgccccgcccccgccccgcgcgccgctccggcgccccgcacccccgccaggcgcatgtctgcacctccgcttgccagaggccctcggtcagcgactggatgctcgccatcaaggtccagtggaagttcttcaagaggaaaggcgcccccgccccaggcttccgcgcccagcgctcgccacgctcagtgcccgttttaccaataaactgagcgaccccag

SEQ ID NO: 74 - DNA, 846 bp, human
ggaatacttgtttctttagcactttgaagatagaaaaaccactttttaagtactaagtcatcatttgccttgaaagtttcctctgcattgggtttgaagtagtttagttatgtctttttctctgtatgtaagtagtataatttgttactttcaaatacccgtactttgaatgtaggtttttttgttgttgttatctataaaaattgagggaaatggttatgcaaaaaaatattttgctttggaccatatttcttaagcatgaaaaaaatgctcagttttgcttgcattccttgagaatgtatttatctgaagatcaaaacaaacaatccagatgtataagtactaggcagaagccaattttaaaatttccttgaataatccatgaaaggaataattcaaatacagataaacagagttggcagtatattatagtgataatttggtattttcacaaaaaaaaagttaaactcttctttgctttctgattataatgaccagctttcggtatttcatggttaccaagttctatttctagaataaacatggttctccttctaaaaaccaaaaacacaagaaagcaacagagaaaagagaaaagtgagagcaggacgagaagacgaggaagaaggtacaagcaaaaagagagagacgaggccccagaagcagaggaaaacacgacacacagacggcacccagcgacacgacgagcacagagaagatgagcgagaacaccaccgcgacacgaaacacggaccggagacaaagacacgcaaggagacacacaagagaagagaggggaaaacaagaatccacacacgaccaacagcgagccaccagacagagacc

SEQ ID NO: 75 - DNA, 1608 bp, human
cagtatccctcctgacaaaactaacaaaaatcctgttagccaaataatcagccacattcatatttaccgtcaaagtttttatcctcattttacagcagtggagagcgattgccccgggtcccacgttaggaagagagagaactgggatttgcacccaggcaatctggggacagagctgtgatcacaactccatgagtcagggccgagccagccccttcaccaccagccggccgcgccccgggaaggaagtttgtggcggaggaggttcgtacgggaggagggggaggcgcccacgcatctggggctgactcgctctttcgcaaaacgtctgggaggagtccctggggccacaaaactgcctccttcctgaggccagaaggagagaagacgtgcagggaccccgcgcacaggagctgccctcgcgacatgggtcacccgccgctgctgccgctgctgctgctgctccacacctgcgtcccagcctcttggggcctgcggtgcatgcagtgtaagaccaacggggattgccgtgtggaagagtgcgccctgggacaggacctctgcaggaccacgatcgtgcgcttgtgggaagaaggagaagagctggagctggtggagaaaagctgtacccactcagagaagaccaacaggaccctgagctatcggactggcttgaagatcaccagccttaccgaggttgtgtgtgggttagacttgtgcaaccagggcaactctggccgggctgtcacctattcccgaagccgttacctcgaatgcatttcctgtggctcatcagacatgagctgtgagaggggccggcaccagagcctgcagtgccgcagccctgaagaacagtgcctggatgtggtgacccactggatccaggaaggtgaagaagtcctggagcttgaaaatctgccgcagaatggccgccagtgttacagctgcaaggggaacagcacccatggatgctcctctgaagagactttcctcattgactgccgaggccccatgaatcaatgtctggtagccaccggcactcacgaaccgaaaaaccaaagctatatggtaagaggctgtgcaaccgcctcaatgtgccaacatgcccacctgggtgacgccttcagcatgaaccacattgatgtctcctgctgtactaaaagtggctgtaaccacccagacctggatgtccagtaccgcagtggggctgctcctcagcctggccctgcccatctcagcctcaccatcaccctgctaatgactgccagactgtggggaggcactctcctctggacctaaacctgaaatccccctctctgccctggctggatccgggggacccctttgcccttccctcggctcccagccctacagacttgctgtgtgacctcaggccagtgtgccgacctctctgggcctcagttttcccagctatgaaaacagctatctcacaaagttgtgtgaagcagaagagaaaagctggaggaaggccgtgggcaatgggagagctcttgttattattaatattgttgccgctgttgtgttgttgttattaattaatattcatattatttattttatacttacataaagattttgtaccagtgg

SEQ ID NO: 76 - DNA, 127168 bp, human
gatctgagcatgatctcccgggtgttgcctgtcagagtggcctcctgcactgcctccacgtgcaacctgcggggacccttcccccacccaccagtgtacagggcctgggagctgccaggctggtggagcagtcagggtccccacaggaagcagatggggtgctccagtgggaccagccctggaagggttatttacaaagggctgggcagggcatggggcatccatgagaggcggtgtgggacccagggctggaggcagtgccagcggagctgcgatggcccttagtcctagagcatcaagggaaagggcagattggagcccagaaagaaggggtcatggtcagaagccacaggagagggctgcggaccacccaggaggggcacagctaaccagggaccctcctgacacccctcccctccctcactctatcctcccgtctggctccccactggccaaagccaccagaagccatggggtagggaaccctcccaggcagggagcaggcagagtctgtttatttttcctttctgcctgatgacattttagacgagaaggtttattggtctaattcaccttcagcaaaaccaaagggtacattggagtcggacgtttttccaggacggtcttttcaaaggcaggcacttgtacatttgtgtggcgctccgccaagcacagatgaacaacacagcccccacgcccacagccacgccgggaggtttggggccgagtggagcattttcagtcgttgcttcaccccaggctggttttttgtttgtttgtttgtttgttttttccctcaaggctggtttgaaggtgtgtccacaacttcaaaagggtggacatgcctgacggaaaacgttctccccacttgagaatcggttttgccctcattatgcttaagtgtttgctgctcctccatcgccctcggcatcctgggtgtttgggaagtgtggggagaagcttattccccacggagacagtgctagggaggggccgtctggaaggatggggatcctcggggctgcactgagcgggtcattcccttactgtgcttccctgaggctgcctgcggggatcacgtttagaccccaccttgttccaggagctcctggcagggtcggggacacagacgtgccagcaagatgtttaacggggccctggggaagcaagggtggctcgtgtccacctgacctgggcatcttctaaagccagctgagcctgcccagagcctggagcacagtctcctggccagctggggaggcagggacatgcaggggaggtagtgcctgacatggacaccaggcagtgtggcccgctggggacccgtgagtgagctgtgcagtgaggcagtgaggtggagcgccaggaggcccagagctgctgggagatcccgcatgaagcagatgtgggaggcggtgagcagccgcgtcaggatttcccacctgggcactgccgccccttggggacgatgacccttcattgtgaggcctgttctgggcagcattcctgacctctggtcactagactccagctgttcccctaacccggttttgacaaccaagaggtcttcatcattgtcaggcccctgaggtcatgccctggatgagaaccactgggctagtgagacgggagctcagctagcgggagtcctggtagcttcaggtggagatgcgagaccctgggccggagcttgaggcagcagcctctacgtgggcagcaggtggtctccaaggggcactcggcatccgtcacctggccggggacgatgctgtgctggtcgcgatcgccatgctggccacgggtggctagaccacacgcaatgaagccccatgcctgagctggctgctggagtccttgggactctgcctcggcaatttggcttcctctggttctggtgattctgagatggcgcggggctgtctttggcatgctgcggaaagtgcttttataaagacagcatgaggcccggttgcaacaaaccggaggaccggcctctgcttctgttgagcagaggatgtaagtgctttgagatttccatgaccttgagatgaccgctaggtcctgctgtcattagggattgctcacctgttgcttgtcaggtcattcaaaacctcttgggtctgtgctgcacattaaaccccagagtcccaaggagagtgggagatgtacccccggagcacccctggggtcgggggagcttctccgtttctgcacatgttctaaaaactcgaggacttccacccagacacttgggtcagggtgaggttttttgatgggaccctttctgggctctacagatctgccgtggttagacagttgtgtggtcccctgggtgaggccacgtagccttccctttccctccctccttctctcccttccatgttaattgagtgccaattacacgcacagaatccaacttacagaaacgaacttggaaggtatttaatagaatataaggtcctccgacagcggaacgtcaacaaccattgccaacagtgcggtggggttctgtgcggtgatgaggggaggagctcccaggatcttgttactagattttaaaagccatagttgtagggtgtattttatttattttatttttgagatggagtcccgctctgtcgcccaggcgcctttgttgctgtcttggctcactgcaacctctgcctcccaggttcaagcaattctcctgcctcagcctcctgagtagctgggtttacaggtgcgcgccaccacacccggttaatttttgtacttttagtagagattggagtttcaccatgttggccaggttgttttcaaactcctgacctcaggtgatctccctgccttggcctcccaaacagttaggattacaggcataagccactgcacctggccgagcctggttcttttagtggagggtggcatttagaaatccagatctgggtgcttggtgtgctcattgctttggggtgtctcactcccagtctctcttactgggcagagctaggacatagacgtctgtgtaggtgtgtgtgtgtgtacatatatacatgcacacacacttcatattgatctttttttcctatttatctatcactccctattggaagccatgaacttcactggagcactgctgcgtttgctctgctctgcacattcacatccccctgatgccgtcccagcccattcgtgctgcctggtaacagaacacacaaggctgggtacttacaaaccacagagattgatttctctgagtcctggaggctggaagcctgagcacctgcaggtttggggcctggcgaaggcccattcctcataaatggcagcgtctggggtcctcacatggcggaagaatgcaagacagtggacccactcccatgggcccttttattgaggcccttatcccattcttgaggggctcaccctcatgactttaccacctcctaaagggcccatctcttgaaaccatcccattggccatgaagtttcaacacgtgaactttgggggacacttcagaccatagcacccccaaattgctatattgaaatcctcacccccaaggtgatagtattaggaagtgcagcctttgggaggtgatcagggtctcccgcgagtggaatgaatgtccttataaaagagccccaagaccgcccctcaccccttctgtcatgtgaggatgtggtaagaaggtgtggtctaggaaccgggtggcgaacccttgccagacgttcaatctaccagcaccttgattttggactcgcagcctccagaactgtgagaaacagatgcatgttgtttacaaggcgctcagcctctgttacagcaacccaagcagagttagaggtcattcttgttgtttttcctcttctatatgtgtaactctttaccagttagaaaccttgttctcattttcctcagtatagttagtgatttttctcaaccttccattatctaaacaaccttccaacctcaccaggctgcagcttcactcagccccctccccggctgcgccctccccagccttgctgctctgcctcactcagccctgatggtactagccgactccagcagttggagatgggtctgcatagagacgtgactgaaatatttcattattcaaaaaagaagggaggaagggaagaaggaaggtttttaaaacaaatttaaagggaataaaaatccaaaataacaaaagctgtgggctgcagctaaagcagtgctgagagggaaatgtatagcactaaatacttacattagaaaagggggatgtttcaaatcaataatctgagcttctgcttcaagaacctagaataagaacaaaataaacccaaagccagcagaaagaaggaaataataaagataagagcagcagtcagtgaaattgaaacagcaaaacaatagagaaaatcaatgaaacaaagagccgattctttaagattaacaaaatcttttcaaagcgggggaaaacttctagcgtgactgataaggaaaagagaagacaaattgccaatatcaggaataaaataggctttgtagatgttaaaaagggtaataagggaataattaataaaaagaactctacatgtgtacatttaaaacccagatgcacggaccaactcctcaaaaaacacaaactactacaactcacccaagatgaagtcagtcctttgaatggctgtatacactattgaggaaatagaatttgtagtttaacattcccaaaaaggaaatctccgggcccagatggcttcacaagagaattctaacaaatatttaaagaattacatcaattctgcaacatctcttccagaaaatagagagcacttcccagttcagttcatgaagcattaccctcattccaataccagatgaagacagactaaacaaaaccacagaccactgttcctcatgaatatagatgtgattcatgttgacacagaaacctgcacacaagtggtacagcagcttttcataatatccccaaatgggagacagcccagatggccgtcactgggtgaatggttaaacaaactggtatgtccgtaccatggaacagggaatacttcttagcaccaaacaacttctcactctgctgagtgggaaaaggcaacccccaaaaggaccatactatgtgattccgtttgtatgacattgtgtttttttgtttgtttgcttttcagacagagttttgccttgtatcccaggctggagtgcagtggcacgatctcagctcactgcaacctccacatcctgggttcaagtgattctcctgcctcggctcccaagtagctgagattgcaggcacacaccaccatgctcggctaattttgtatttttagtagagaaggggtttcaccatgttggtcaggctggttttgaactcctgacctcaagtaatccacccatctcgtgcttccaaagtgttgggattacaggcataagccactgcacctggcatttatgacattcttaatacgacagaataacaatggaaaacagagtagtggttgcctgggattgggctggggacaggagggaagtgggtgtggctgtgataggacacaggcagggtccttgtagtgatggaacgttctgtctggactgtgtcagtgtttgtacctgggtttgatattatactatctttttgcagggtgtttccatggatggaaactgtaaggggtacatgggatatctctgtattattgttttacaattgcatgtacctctaaaattgtctcaaaatagaaagtttcatcaaaataactttcaggccaggtgtggtggctcacgcctgtaaccccagcactttgggaggctaaggtgggaggattgcttgagcccaggagttcaagatcagcctgggcaacatagggagaatacatctcttcaaaatacaaagtaaaaaaaaaaaaattagccgggtgtgtggtgcatgtgcctatggtcccagctgcttgggaggctgaggtgggaggattacttgggcctggaaggtcgaggctgttgtaagccatgattgtaccactgcactccaacctgggcgaaagagtgagactcttgtcttaaaaaaaaatttttttttaagatttacaatgtttgctggtatatacatatgtttttctgaaggataaccctatgctctccaaaacaacaaacttgtgttttttttctttgtttgttttgagatgcagtctcactctgtcacccaggctggcacaatctcggctcactgcaacctccgcctcctgagttcaagccattctcctgccctcagcctcccaagtagctgggattacaggtgcgcaccaccaccacgcctggctaattttggtatttttagtagagatgggatttcaccatgttggccaggctggtctcgaactcctgacctcaggtgatccaactgcctcagcctcccaaagtgctggattataggcgtgagccaccgcacccggcccatacttgttaatagtgctcatcggatagctttttcaaggtcataaactgcctaaagcatggagtctttttttttttttttttctgagacgaagtttcgctcctgttgcccaggctggagtgtaaaggcgcgatctcggctcaccgcaacctctgcctcccaggttcaagcaattctcctgcctcagcctcccgagtaggtgggattacaggcctgcaccaccacgcccggctaattttgtatttttagtagagacggggtttctccatgttgaggctggtcttgaactcctgacctcaggtgatctgcccccctcggcctcccaaagtgctgggattacaggcgtgagccaccgcgcctggccagcatggagtcttgatcagatatttattattcctggtgatgcagtggtttggctgctggttcttctggtctatgcgattcagccagggctgtgtgaaggcctcactcatatgacctggccgttagccatggcagctggggcctctcatcttccagcaggccaccctggccgttcacttggtggcagggggttcctagcagccagagagggcgagtcccagtgcacggtgctttccaggccttatctcgtgtccttgtgccctgatgtcctgttgcccaggtcatgtggccaagcccagcctctaggtagagacatggaccattggtggcaagagccaggaggtggcattgcagaggccagacgtacagtgcaggaggcatcatcgtggcccttatagcaaaggtggataccaatgggaagaagaatgcaaagtgaggtggatttcgtgttccttttatgcccttctgtgccttcttacatgcacttgagttctttgtatttaaaaaaacaatatagcagttatctgggtcatgggactatgagccattttttttttttttgagatggagtctcgctctgtcgcccaggctggagtgcagtggcgtgatctcagctcactgcaagctccacctcctgggttcacaccattctcctgcctcagtctcctgagtagctgggactacaggcgcccaccaccatgcccggctaatttttatttatttatttatttattttttattattattatttttttttagtagagacggggtttcaccgtgttggccaggatggtctcagtcacctgacctcgtgatccgcccccccttggcctcccaaagtgctgcgattacaggtgtgagccactgcgcccggccctggttttttcttttaaatattctgtttaaaaaaatcatttgagggccaggcacggtggctcacgcctgtaatcctagcactttgggaggccgaggcaggcagatcacttgaagtcaggagttcaaaaccagcctggccaacctggcaaaaccccatctctactaaaaatacaaaaaaattagccgggcgtggtggcaggtgcccataatctcagctactcgggaggctgaggcaggagaatctcttgaacctgggaggtagaggttgcagtgagccaagaccgtgccactgcactctagcctgggcgacagagtgagactctgtctcaaaaataaaacaaaaaaaataaacaaaaagataattggatatacagaatatgtaagataaagaagctaaacttttacaaagttaattaagccttgcaaagtatgtaaaatccttatgataaaggaggtggccatgcaggctggtaattttgccctcagggccttgttggctttgattctgtctcataggaagttccgtgtttaagaggaggggatggggatgctccccaggtgttccgtggctgcgtgaaaggtcacgcccttcgtgagcttccctggcttctccagccccagcaggtgttctgtcaaatccactagtggggcctctgctaaggcagtctgcacgtgctcccatcagttggtgaagtcggcggccactgcctttacttaccctgcatctcggactcaggatgttcctgcctccttgagcccaagtgatgggggcatagaagccgatagaggggtcttcaggtggctagcgagctctgccagaaaggtggtgcagggccctgcttgcaggcgctgtggcaggtgggggctgccccgatgctgctatgtgatgtgacagataagtcacttggtttccgttcccaaacacaggcctggtcaggtggtagaaagtcacctgctatggaaacgtggtgattctcggaggcaagcgccgccccaccctgggcctttgtgttacagaaccctgttatggaaagtcgccccagggctggagcagccctcagtttcacgcccggctgaggttgcttcctgtctggcatcatagccactgtcctccagcagcctctgtctcacccccatccttcccaccccacccaacccctcactgctggggctctgagatgcactgtgccacggctgcctccctcccctctctgggctcctggcctttcccgcctctacccccccagcacctcggcagggagggtggtggtggctgaagtgtactggctgatgtcctgtcttgtgccaggctcatgtgtgtcccccacgtgatcctcatgttagctcctggaggaggaggtgctgttgctgtttcacagatgaggaaactgaagcacagagtagatgatgggagggccgggtttaggcggagccatggacccagcatctctcacccacccgtgtatccgctgctctgggacgtgccatccgagggctgtcgcgttttcctgccgtgaccatccccggcccccaccttctccctgtcttatccaggcgcttccatgctctgtcccccaattcagccctctccccaccttcaccttatcacacagatactgagcatgtcaccccttagtgggatgcaggccaggagggagggaggctggtcagaaaggtcatcagggcaagaagaggcagggggactaaggaagggggtcccgcgggcccagatcgaggacagagaggggactattaggtctttacaggagcaggccatgactttgtatgagcatgtgttagtgtgcaagactgtgtgcaaggtgagtgtgtacaggtgagtatattgtgcaagcatgagcacgagtatgggtgagcatgtgtgcacacaagtgtgtgctagtatatctgtgtgtgcacatgcaagtatgaatgatgtgagtgggtgtgtccacgtgtgcacacgtgtgagtgcatacgtgagtgggtgagtgcacctgggtgagtatgcatgtgtgtgggtgtgtgcacgtgtgtgaagaagcacacgtgtaaatgtgtgggtgagtgcacatttgagtgggtgagcatgcacatgtgggtaaatgtgcacatgagtgcacgagtgggtgagtgcatacgtgagtgcacatgagtggctgagtgtgcatatatgagtgcacgtgtgtgggcgagtgcatttgagtgtgggtgagcatatgtgggtgtgaatgtgggtatgtacgagtgtgggtaggtgtgcacatgtgagtatgaatgagtgcacgtgtgggtgagggcacatttgagtgggtgagtgtatatgtgagtgtgaatgtggatgagtatgcacgagtgtgggtaggtgtgcacatgtgagtatgagcgcacgtgtgggtgagtgcacatttgagtgtgagtgtcggtaagtgcacgtgggttttgagtatgcacatgattgtgggtgagtgtacataagggtgagtgcacgtgtgcgtgggtgagtgtgcatgagtttgggtaagtgtacgtgtgagcgtatgaataaatgcacatgaatgtgagaaggcacgtgtgggagtgcacatgtgggtgtgaatgcgggtatgcacgtgagcgtgggtaaatgtgcacgagtatgagtgcatgtgcatgggtgagggcgcatttgagtgtgagtggtgagtgtgcacgtgtgggtttgagtatgcacgagtgtgggtgagtgtacacacgtgagtgtgagtgggcgagtgtacacatttttggtaagcttttttgcttgctcagaaaagtcattttcgagggaactgtagcccacctgccatccttcctgaagttttctcctgtttttcccgggacactcaggctactgtgttgtgggggctgagctcagaggccccatcccaggcactctgtcccggtgcccgtgtggaggaggcaggccccgggaggctgcagctcggaagtgtgcgttcctccttgtcccgcttgtcaggatttctctagctgggagtagcattaggattgagatgcctcccacccatagaggaacatgagtgagcttcttgttgagtgcttgaggagggtccctcaggttgtaccaagcaactttttgcctataaaatccccaagagaaggaacgtgttgctttccaagaaggcgctgtatctcactgcattttggcccttcatttgtcattggcaagaagacccccctctgagcaaatccccatataattcccaggctcccaaaacacctgggggagtagcctggccgcagaggtgacctggtcccgatggctgagccccaaaggagcagggctgagatggccctggcttcctcccatggaactgggggctttggtccagggtctggctcagtgggggctggcacggtgccctgctggatcatttccagaacaaaattaactaccacggggatcatggagctctgtaggaggagcttatctccgtccagtgctgaacacgcatgcccaggggactcctgcctccggacccacggttcttgtgtttccaaatgtactgtatacgtccatcaggaaagcacagagctcctcacttttgtctttggccagaatcatcggggaaacgggttagacccccttgcctgagaaataaaaggctttgtgtgatttctttaagaatctctaggtgaccggttggttctgacctttgttgaaaacttttctaatgctcccacaataagcctaatagcaccgtgcattactttcttggatagttgaataaatggaggaaatggcgggccagtgcccgaactccaagctgcaggtggctttgcgtcttagctcctggagaagagcctgcgggttcagcggagaggctaattgcacgagttgcttacttgctgcttttttctttaaagatgtaaaaatcaactttatgattttatgttatattttattttaatttatttatttatttattctgaggcggaatcttgctctgtcgcccaggctggagtgtagttgtacaatctcggcccactgcaacctccgtctcccgggttcaagcgattttccacctcagccacccaagtagctgggattacaggcccccaccaccatgcctggctaattttttttgtattttttcagtagagatggggtttcaccttgttggccaggctggtcgcaaactcctgactgcaagtgatccgcccacctcggcctcccaaagtgctgggattacaggcgtgagccactgcgttcagcccctgtattatgttattttaatatagggaagtattaaaacagcaaaacttgagaaaaccacttgcatgttattttgcttttcttcacatcttttcaagaagtaacaatagcaggcatggctgcaagcacttcacacatgtcattcatgtcgtcccacgaggaagatgctatttttacccccagttgtacagccaagtcctggcatgcagggaagtcatgtgactttcccaagtaggggcaggatatggacccttggctttaaggaggtgatgtccattggatgctgtggacactgctgtcctgtgagccccccgccggccttgggcccgcccagctggactctgagttgagaatgaggatgatagtaatatcagccacgccagctcagacactgcacagtttcagatccgtcctttcatttcattcccaaacagccctagagatagcagctatgcacttaccccctttctagaagagtctgcctaggctcatagagtatgtcttctgccccaggtccctggcaggtgagggattcaggagcacctgtccccctcagccagagttgggcagaggaacttgagttccccttacaacctgggatagtgtggagctgccctccccacccggtggcccagtggctcagttgggcttccagacggtttgctgctgacagccctgggggaataccgcacccttcgagccaggtcatcaaaagcagccggcagcccctgtgtagagggtggctacctggcggaacagggtcctgttacctgcctaggggtattgggaccaccaggaagtagcagctcggtctgaggtttgcattctggcaaagtcctgtccgaggctcctgggaggccagtttgaattctggaaggctgcgtgcatctgcgtgaatttgctcctcgtgacccttcccaccactttcccaagcagcttcggagaactgcagtggctgcctccgagggagagcttgtcgtctccatgccagaactggcacggggtcttgcccacatttcctggggcatttgtcggccagacaggcctgaactttgtcatcttgagaaatgacagcatggaacgttcagcgctgcagtttgactctgtacagacattcctgaggtccagccatctgtgaattctttgatatgaacgttggttaatcatttctgacacagagcatgaattcattcatttcctaagacgtgcccctcccacccccccacaccgccttcccctgctaccttccccagcattgaaaccgtacccccaccggcctcccaatgcagaatcgtctgcagcaggttaaaaggctggagaaatgtgagcacttcgtaaggaccaaatgcttttgtgcgcacacagaaactcccagcactgcgtagagcggctgagtggaagccaaggaggagggcctgcacgcagggaagaaaatacctcgaaggaaaataagaagaggctggaccccggggatgactcctggagcaggattccggatctgcacagcttagcgcttctgggccactccttgcagtgctcagcggcactgtaggttttttctcaggtggctgcaggagtgagcatgtggcttttccttgctggctctgtttccgcctgccccagggagcctgtgctggccagggttgcccgccgaggggtgtagaggtaccgtgggcagcccctgctgtctccagtcactgtgtgcgctgcctgccttgctcggcctgagtgaccaggtccagctactgagctttatgtcctggaagcgaggcctgggaattgcctttcctgcaaggggtgttggtgcaggggttggggggggtcctctgggcctggccggctgctgcgcagtacccagctgagccctggaagggcaggtgccggggcgctggggcctccaccgtgctggccttggcccatcctgtgcccggcgctttccaacacaagaattgagaaaaaactcagacacaaccctgtggcccccttcattcccacgctgtctttttcttttgtataaatatgtggcaaactttaaaaattcctcttagaaatgtgaggaggcggttcgtctgtctcattccttatccgcccccctctgcaacctgtaccattcatcgtcagctgtgacccagccaagccaccaagtgcttttcctggctggaaaactcagaggcggacacgccaccccacagtcgggagctgttaccaccacgtagtcttttctctgccgccgcctcgtgctccacgccggcctttcagcggagacgcactttgtcttcctttgacaaaaatggatgatctgagcccagatcacacacatctgctgctgttttcacttatccctattcaagccgcctgtgtaattgtccatgcgcctctcgacccctcctggagaatgttcacctctctgactgcgttttatcactcatagccacctggcaggaaggccaaataatgcattttctctccatgtcagggaaaaattggaaggatcttcccgaaagttcttcaggtggagagtggcagggggctggtgaggggggatgcccacccaggaatctttttttttttttaattttttccttattgaggtgaagttcacatagcataaaattaagctttaaaggggcttctagtatattcagagtattgtaccacaccacttctattgagatctaaaatgttttcatgccatcagttaaccaatagtaactttttaaaaaataataaaatattttcatcacccaggctggatggtacggtggctcatgcctgtaatcccagcacttcgggaggccgaggcaggtggatcacttgaggtcaggagttcgagaccagcctggccatcatggtgaaaccccatctctactaaaaatacaaaaattagccaggtgtggtgatgggcacctgtagtcccagctacttgggaggctgaggcaggagaatcgcttgaacctgggaggcggaggttgcagtgagccgagatcatgccacggcactccagcctgggtgacagagcgagattccatctcaaaagaagtattttcatcaccccataccattagcagtcaccccccatcctcctccctgagctcctggcaacatctgtctgctctgtgtctgtggatgtgcctgtcctggacattgtgtaggaatggagtcacgcggtgcatggcctttcgtgtctggctgctttcactgagcgcgatgtgttccgggacccccgcaccgttgtgtgtcagcgcttcgtgcctttcggtggctgcgattccggtgcagggatgggccacagtttgcccactcatctactgatggacatttaggtggtttccacttcttgtgagttgtaaatagcaacgccgtcaacactcatgaactggtttttgagttcctgttttcagttcttttgggtacacgcctggggctggtggtgctgggtcatgtagtagttctgcgtttaatgctttggggacccccgtctgtgcgtctcaggtcacccacagcaccgtgtccatgcactccctgcctccgtgacacttgctggcctcaactgcagagtggacggttagcctgcgcgttaaacccacactcgccgagaggcgggagagtggacggttagcctgcgtgtttaacccacactcgccgagaggcgggagagtggacggttagcctgcgcgttaaacccacactcgccgagaggcgggcattttaaaccagagcctcactcagcacctattcaggggtgacaggagagggatgggccatcgggatgctgtgatttctcctccgagcagcagggacctcagaccccacagatccccccgctcctctgtgcagccctcctgctggttcttccagctctccacctgagaacattcggctctttcgccaaaagtgctgttacttttgacccagtggccgccggtgggtgtctctgggagtcagaatcgagcagcacatcctgggcgctgtctatcagagaccgtttcctaaacgccctgtgcctgctgctctgattcacgaaggccagactgaagtcaggtgtcctagcagtgggtgtctcacatgagtcagtgccactcgaaaaacaagcgtggattgcattggctttgtcttttgcctccagctttctttatcctgctgttttttgcttgaatccgtagctctgagccattgattaccagcagcagtttacagcaactgcagttttgtaaacagtagcttaatgtcatgaaagccttcccagtgtaaatgctacttacgcccttcctccagtagtctcacgcccagccccaaaaatgtaaattataagttgtaaagataaggtggggctcacaaagtgaggggaggttctcctttccctgggatcgcatctcacatttaagcgtcccataatgggcacttccacgcgttttccaaagtgggccgcgttacacagcgagaaaacagatgatttttaatgcactcgcctacctgttgcttaaccaaaagtggagtctttaaggagacagcttatcagaccttgtgatttcatcagctgatgtaaaagaaaaatgaaaaaggtgatccatgcattcgaataccaggggtcatggtagaagcctcccttggatttacagacaagggcgtgtgggaaactcacgtatctctgttgatatcatcctcaattccctgtaacacagagaggacgtgtgttctaatagtaaatcgttatcttgcacaaaaagaaattgaggtacagtcatgggtctcactcacgttagatgattggataagagggaggagaagcctcagctggggtggccacatacagttgtgcaggctgcccactgcacaactccaggcagggcgtgctgcctgggtgtccagggtccccagaagtcatgcaacttggccatctggctgagctcctgtttccagttgtgtgtcctgcttttcagcctcgtttccctgatcaaaatagatactttgttcctattaaaaactgaagatttatttttgaatgaactatgtggttgttattttcctattaaaaggcactgaggatgatttaattaaattctacgtttttacaacgatctatttccacgttttataaagaagcatgagattgtatcatgctataaactcaaactgaccccagaactatcaggaggaggcatcgaacccatcctttataggggtggtgggagggaccctgctgggactggaagaaaaggttctctctggggtggagggggaggctctgctgcgcattgtgtgccaattgtggggcatggtggcacttgcctggcgatctcctggctcatcgtcacggccacctgtgggatgtaggtcttgttatccaggttgtgcagatgaaagacattctgttgcctgtcccggttggagctggcaccaactgtgtttctggaactttgagacccacatgcttaagttccgtggccagcatggattgtgtagggcgggtgctgcttttcctcctggaagggcgtctgaggctggctgggtggatatgcttcgtgtcctgggagggactgaccaggagctgagacctgcgagggctgtctggggaaagtgggctcgtccccggatggcaaaccacagtctcttggagaagggaaaggtttcacccaaggtcactgattccagaagaactcttgtacccaatcctggcccagagagggagttccacgccttagaggggagatgtggggccgtctgcaggccgggcagtggcctcctggtgtctgtactccaggagcacgaacctggccaggtgccgtggtcaggaggacacccccagaagagcagaagcgggtgttcacaggaggggccccaggacttgggtgttggctgcaacttcatttcctggggccaccatcacaaagtaccacggacagggtggctcaaacaacagacatgattctctctcagtctggtgcctagaagtcaaggcgcgggtagggccgtgcctcctccgaaggctgaaggggaggacccttcctgccttttcctagctgtcggtggcccaggtggcccttggcttgtaaacagctgctccagcagctgcctccgcggtcacgcagcttctccctgtgtgcctttgcatctcagcatctgtcctcttaagaggacaccagtcatcttggatcagggcccgcctactccaggacgtccgcatcttagctaattccatcagcaccagctctttgtccagaccaggccacgttctgagattctgggaagcagaacttgagggggcattgagcagcccagcacagctagtttggggaactaaaggccgggggctcctcatcccttgtctacgtgccgcccaccctgtgccatgtcctcctcgctctatgagtgacaggtgcgcctgctgagggcactggtggagaaaacgctgacaccttctgtgctttctcttcttacagcccaatattggccacctgggcctgccccatgggccgtccggggaaaagatggccgtggtgacagtggatgattgtgacacaaccatggctgtgcgctttggaaaggacatcgggaactacagctgcgctgcccagggcactcagaccggctccaagaagtgagcatcccaggaggggaggccctgggggtccgtacccccaaacatgctcaccctgcggccttcccagggcagggccccacgtaggcactctgggtgcagtgccctggcgacctcattccaggctagagtcagacatcctgtccatggttggggcaccttccctctgaccttctagaataagtctccctaagtatgtgtcaagagtggccaggccgaccccagggttgtgatggccagcttgcagaccccgagacggtctccagccccatctccacggatcactggctttgtccccgcaaattctggtacctgggactccaggactctgttaagtgaagcactgtgtcagccagctggtcccagaggcttatgtttttttgttgttgttttgtttttttctgagatggggtctcgctctgttgcccaggctggagtgcagtggcacgattctagctcactgaagccttgacctcctggactcaagccatcctcctgccacagcctcccgagtagctgggactacaggcatgcaccaccacgcccagctaatttttgtatttttagtagacaccatcctgttggccaggatggtctcgatctcttgacctcgtgatctgcccgcctcagcctcccaaagtgctgggttctcattttcttctggcctcctttcaaggcccttccttttcctagaaggtctcagaggcaagggtaaagtatagtccctgctggccttgacctgtgctccctgcgctcacatcctgtctcggtgtggaccagcctgggtgggcggggcttggtggtcactggtgagcgtgaaacacccagatcgtcaggactgaacacaagtgtgagcaaacggaggcagtggcggcaccagacacaggagccccctctgactttggcctctccccgcctgtctgcttggtttctgaagtagttatggtggtagaggctacacagaggcaactgcggagcccagcccgccgtggccgcctctccccgccctgacgtcacagaagatggctttacctacccaggtccctggatctgaccggccctctactcctggggggtgtccccaacctgccagaagacttcccagtgcacaaccggcagttcgtgggctgcatgcggaacctgtcagtcgacggcaaaaatgtggacatggccggattcatcgccaacaatggcacccgggaaggtacgggtggccgtcagggcgtcggagctgccgcagtggcatctggctggacgtcggcagccacacagaggtcactgcttgcagatccctggggagccgtgtttttcttagaaatgtatgtgtccagcggtgggcagctcctgggatggaacccggagtccaggctggagatgtgcatctccgcagttcctgcatctgcagtttggggttgccttggcactgctggcccagccagctaacccgaggcgcacatgatcctagggtcttgcatatgtgtcaccaggtgaccgggccggctgccgtgatggcctggcgtcccagcgtctccaaatgtggtcagtgcgttcagcaccttcttagttcccatgttcctgccgttgccaggggcgttcagacctggtctgacttctgtccagccccgggtccattccgtcctggtttcccacgccacgtctggcgccggggaccccgggcggttcctccgagtcaggctctgccgcacgctctgtgttgccaggctgcgctgctcggaggaacttctgcgatgggaggcggtgtcagaatggaggcacctgtgtcaacaggtggaatatgtatctgtgtgagtgtccactccgattcggcgggaagaactgtgagcaaggtgagtggccggcgtcgtccatccccccggtcacggcggcctgggaggcattgctccttgatgtgcccgggaccaccgtgagggggcttcacatccaggtccggcagcctctggtggtatatgctgcatttactgtggactcacaccgccctctccaagagactgtcctccgcagagcccctgctcctgcttctggggtccccagtccctcaggtgtggggtgggacaggtaggctgggccggcagagcccagccccagcaccccagccacggagcccagggatcctgaacccgcccccgtctgcctcctgtcaagcctgagagccccttaccacgcccatctgtggctgggagcctgcagatcttcatgcttcccagcaaggaggctcacgtcccagggtgcgcttctctggagcccacgtggctgactgtgagggctggatgcgtcacagaggggaggctcagacccaccttcgtgttaaagtgaaaaaggcccaggcctagcctgcaggcccatcccccgcccctgcagccaagtccgcggccgtgtgatttcgggagacacctgaggtccctgggcctgtgtccgcagccatgcctcacccccagctcttcagcggtgagagcgtcgtgtcctggagtgacctgaacatcatcatctctgtgccctggtacctggggctcatgttccggacccggaaggaggacagcgttctgatggaggccaccagtggtgggcccaccagctttcgcctccaggtgactggggccccgtgccaccaaggcacctgctaggtgggtgcccgagggagggacccaggcgctgggcttcctggtgcacactcgggcacctgctactcgcccttcctccggcgcccgcccctggggttctccgaagagggggaaggggaatatcagccctttctttcctctgggaggcggagacagcgagggagcatggggctgggccaaccctggggcccagcagagctcagcggcagttctggtctccctctagcctgagggtttggctggagcgtgggcattgcagaactgagggaggtgccgagccttcaggcggaaacagtgagcctcaccagttaaagctgcagccaggtgcaggccggggtggtggctcatgcctgtaatcccaacactttgggtggcggaggccggcggatcacctgaggtcagaagttcgagaccagcctggccaacatggtgaaaccccatctctactaaaaatacaaaaaaaattagccaggcttggtagtgggggcctgtaaccccagctacctgggaggctgaggcaggggaatcacttgaatctggaaggcggaggttgcagtgacccgagaacgtgtcaccacactccagtctggacgacaagacagagactccatctcaaaaagccacagccaggtggtggttggcaccaatgcacgtccactttctctgggagcttgagatgcctcagcccagaaatgcctaaagccccgctctgtcgctgtctgcctgttttctctgtcttattgatctttactgtttcgtttatttgaaacaaaagtttatttgttggataaaaattccgaacagcttttagaaggtgattcgaatgcactctttcctccggttttctgcgccacacggtttctgctcgcatcttccatgctccgtagacactttgtttgagaaacagttatgagccctgtcttctgtcatcgggctgcccttctgccacaacctccgccgcatgaggcagccatggggaccctccccaggagggtgcccggccctcggcttgccctcttgcccctctgcctgtgcatctgaaggtcattctcgtctgtagtgatggcggggcacgggcgctctcctgtaaacccagctgctgtgaccctttctgatcagggtctagctctgaaaactcactgggcaattctccctcctaaaaagctccctttatgtctctccttaggcctaattctcatcccctggcacgggagtggcctgtgggagccgtgcctgagcagggcgctctgtcttgatttgacagattcataactgagttattccttccttcatcctaggttttttttgttttgttttgttttgtttttttgagataaagttttgctcttgttgcccaggctggagtgcgacggcgtaacctcagctcactgcaacttctgccccccaggttcaagcgattctcctgcctcagcctccattgtagttgggattacaggagctcaccaccacacctggctaaatttgctgtatttttagtagagacagggttttgctatgttgaccaggctggtctcgaactcctgacctcaggtgatccactcgcctccgcctcccaaagtgctgggattacagatgtgactcttatgcttttctccaagtttgtgtgtgtgtgtgcgcatatctccgtgcaagtgtgtgtgcatgtcagtctgtgtatgtgcatctctccatgcgtgcacatttgtgcatgtctgtgtgcatgtggctgtatatgtatgtgtgtgcacccatgtgatgagacctgggtgcacatggtctcagagcagcactgacttccttctggttgttcattatctccaaccagagtgagcctggggctccctcctgacctcccttcagcgcacagagatgctgcccttaggttagcctcctctcctgccttggggtcggccacacgggaacactcaccctgttctcccaggatgaccccccctccccgctcctgcggtcaggaagtccctcccaaagcggcgtctgggctgcgtgtcctccgccatcagctgtgtgccgtggcggagccatgccttattgcctttgctccgttgggctctgggcttcttttgctgccgagtgtgtcctggacaccatcccgcatcaggggaagctgggctaaggtcagatggtgagaggtgagatggattttacggagtgcctgctccaagctctcgttccacacacgggaaactgaggcgtagaggctcttcactagggaccctatggttcttttcctgcccaggttcctgggacagccacaggcccttctctgtcactcctaaggacagcccatctagaaacagttctgtatagccaagattggcatgagggttggcgggtggacagagggactgcccagcacatgccctccccatcatgagtgcctggttggagtgtggcgggggcaggaccgagagtgctcccagcaggctggtggaggtcagtccctcagcagatcagcgagggctcaggagatgggtcggggctgtggggcaggggctcaggcctggacagggagcctcctgttcctccccatcacagctcgggagcattttccagcacagacctctcggattgcctggaaggtgtggtgtgcgccagggatgattacagctggcctgtgggcccttgttaacctgtaatttcatgagtctcccaggcagccccagaagcttgctccaggccaaaacttggcaagtgcggtgctgcctggggatggtattttctgtgtggtggtttcactgtcagaacaaattaaattggctgttggatgcaggtgatgaactggagcttgcaagttgtcatttggcagtggggtctctgtaggaaaaaagtgcgctttcagtaggaatggtgctggaagccacagactccggtgctgtttgtgtaattacatcatggagggctcatccccagattaggaattttgccagggactacagccagccctccctgtggaagtctgggtggctggaggggtggccttgaggggatgctgcagaccccactgggcacccagaaggcccccagggcagctcgcagaggccggtcaaccacacgttaccgaaggttctgggggatttctccttgccattatcagcttgcaggcctcccgtgggcctgtgagctccgtaaagcagcagtttggctgtccctcaaaggatgtctcctgtgcccctgccactgtggtgggacaaagaagactccattgtaatcccacagcccaagcaatttggataattgctctcgggcacccaaaatccacccaccttgtcaggtgggataaccttgagattgctgaatgcctctctgactgagagctggggacacactctcagttacctcccataaaacaggttcatcctgtggatatcacttttgtttgtagatataacatcacttttatcactgatctgctcactttggagttctttaagcaagaacaatgcaagagatggcaaaggaattttttttttttttttttttttgagacggagtctcgctctgtcacccaggctggagtgcagtggcatgatctcagcccattgcaagctctgtctcccaggttcacgccattctcctgcctcagcctcccgagtagttggggctacaggcccctgccacgacgcctggctaattttttgtatttttagtagagacagggtttcaccgggttagccaggatggtctcggtctcctgacctcgtgatccacccgcctcagcctcccaaagtgctgggattacaggcacgagccactgtgcacggccaagcaaaggaaattaataagctgacttctatagaacaaaagaaaacaaaatggaggctgggtgcagtggctcacgcctgtaatcccagcactttgggagactgaggcgggtggatcacctgaggtcaggagtttgagaccagcatggccaacatggggaaaccccatctctgctaaaaatacaaaaattagctgggtgtggtggtgcatacctgtaatcccagctactccggaggctaaggcaggagaatcactcgaactcaggaggcagaggttgcagtgagccaaggttataccactgtactccagcctgggtaacaagagcgaaactgtctcaaaaaaaagacaaaatagaaaaaggtgaaaagttatcttcttaaaataactatcaggccaggtacagtggctcatggatgtaatcctaccactttggaaggccaaggcaggtggatcacctgaggtcaggagttcaagaccagcctggccatcatggagaaaccttgtttctactaaaaatacaaaaattagccaggtgtgcatctgtttttttgtgtgtgtgtgcccccctcccccaccaaaaacccaaactatcaatagagaccaaaaagcaaaatacagttttagttacataatctttacagccagttaaaacctgtatcctgttttctctcatgaatttatcttagactgatgtgatatttagaagtagatttctaggttagcaagcatgtagcgttttcttttcttttttctttttcttttttttttgaaatggagtctcactctgtctcccaggttggagtgcagtggcgtgaactctgctcactgcaacctctgcctcccaggttcaagggattctcctacctcagcctcccgagtagctgagattacaggtgtgtgccaccacgcccagctaatttttgtatttttagtagagacaggttttcaccatgttggccaggctggtctccaactcctgacctcaggtgacccacccgcctcgatctcccaaagtgctggtatttcaggtgtgagccaccgcgcccagcctcatgtagcattttctagtaaatcattttggtattgtttttagcataattgcaggtcaaagaatgtataccatgtggtttcagagctttgaaatgtggtttacagcccagatctagtcagttttttttttctttttttctttttttttttttttttttgagacggagtttcactctgtcaccaggctggagtgcagtggtgcaatctcagctcactgcagcctccacctcccgggttcaagggattcccttgcctcagcctccttagtagctggaattataggtgcctgccaccacatccagataatgtttgtatttttagtagagacggggtttcaccatgtaggccatgctggtctcgatcccctgacctcaggtgatctgtctgcctccacctcccaaagtattgggattagagttgtgagccaccgtgcctggcctctagccagttttgtacacatgcccctgtgtgctctgcagttgttatctgtactgttctatatacatcaagtaggttaaatttgttaatcgtggtattcaaatattctatatcgttattgttttttttgtgtgtgtgacagagtcttgctctgtcgcccaggctggagtgcagtggcttgatctcgtctcactgcaagctccacctcctgggttcatgccattctcctgcctcagcctcccaaatagctgggactacaggcgcccactaccacgcctggctattttttttttttttttgtatttttagtagacacggggtttcaccgtgttagccaggatggcctcgatctcctgaccttgtgatccacccgcctcagcctcccaaagtgctgggattacaggtgtaagccaccgcgccagcctattggttttaattattgtttttttgtctttgtctcctcacttactgagagaagttagttacaaatctaccttgactgtagatttatctattacttctcttagtaatcttgatttttgctatatagattttgaggccaggttattaggtgcatacaaatttagagctgatttatcttcccagcaaattgacttggttatcattatgaaattcctctttttctgtagtgaggacttttgccttaagtctactttgtctcatattaacatagctataccatttgtcttttggttggtatttatatgatgtatttttttctatccttttactttcaacattttctgtatccttatatttcaggtataatataagcagtgtgctaatagttgtttttctaaaatctaggctattttttgaagttatctttaaatatgagcatcttaggttagttacaaccttgttttctgattcttcttacatgtacttaaacatggccgtttgacccttatctctgtaacacctacacccagaagtaagtctaattgtctcactgagtctgtttccttgaaagttttgtggttcccagtgttatttttgagtctgtgtctgatgaatctgtggtctgttgccactcttccttgcttctcttggttttcaagcatattaccttatatcctcgtatacttggctattttttattgagtgctagacattttattgaaaaactagagagcatttgaaactagaatgggggccaggtgcagtggctcatgcctgtaatcccagcactttgggaggccaagacaggcagatcacctgaggtcaggagttcgagaccagcctgaccaacatggagaagccccgtctctactaaaaatacagaaaattagctgggtgtggtggtgggtacctgtatctcagctactcgggaggctgaggcaggagaatcacttgaacctgggaggtggagtttacagtgagctgagattgtgccattgcactccagcctgggcaacaagagtgaaactctgtctcaaaaaaaaaaaaaagaaaaagagaaactagaatggggatgatggggatgtcattatcttccatgtttgcttctggcaaccactaggagcactttccctcccagagcacttgaatgcagtcacagacttttttgtttgtgtgtttttgagatggagtctcgctccatcgcccaggctggagtgcggtggcgtgatctcggttcactgctacctccgcctcccgagttcaagcaattctcctgtctcagcctcccaagcagctggaactacaggcacctgccaccacgcccagctaattttttgtatttttagtagagatggggtttcaccttgttggtcaggctggtctcaaactcctgacctcaggtgatccacccgccttggtctcccaaagtcacagagtttaatgcagtcacagactgaggtggttcaaagctgggcttccagtcctgcaaaggtggctctttttcgtttttatcgttagtgtaaacccctcagggttccaaccagaagccaaggaacaacccttggcagtccatgaaccccagtttttaatcctccagccccatgaacctagaaagcttttaggcatcttgagactctaggtcacaggcgactgatggagcgtcgtaccacctgctgatagggctgaagagtgccaaggagggcaggggtttcaggtacctggcagccgtgacctgactgcacgctcagcctccactgtgtcttccagaaccagctgacggccttgcagggaagcacacgccacgctgttttgcagattctgtcttttccttggttgtgagcctgaaactctgttttgcctggagccacttcagtgtcttcaaacagacattctttaatattttgtctcatgttcgtaggtgatttcaagaggagaggtggtccaaattgccaagtcctttcttaggagatctaagattttcacgctgcccttggcctaccttattttaaaatatgagtgttttaggccagttgcaatgctgatttttgtttttttcatacatgtaattaaacacagaggattaaatcttgtcttataaagtataatgtttacatccaaaaataggagcccagtagttacctgaatcgagctgggtcccagtacttaaaagcctaatggggcttgttcttggcgcttcccttacttgacctccatgaagcgattgatcctttttcccgtagaataagacaagcaattctgatcagtgttaaaggcaacagcaacaaagaacaactttgcctatactttttttttttttgagacaggttctcactctgtcacccaagtcgaagtacagtagtgctacctaggctcactgcaacctctgcctcctgggcttgagtgatccttccacctcagcctcccaagtagctgggattacaggagcacaccaccatgcccagctaatttttgtatttttagtagacacgaggttttgccatgtttgccaggctggccttgacctcctggcctcaagcaatccacccgccttggcttcccaaagtgctgaaattacaggtgtgagccaccacgcccagccaactttgtctaatgatgattattattttgagacagagtctcgctcttgtctcccaggctggagtgcagtggcgcgatctcggctcactgcaacctctagtagactcccaggttcaagcgattctgctgccttagcctgcggagtagccgggcttacaggtgcctgccaccatgcctggctaatttcagtatttttagtagaggcaggtttcaccatgttggccaggctggtcttgaactcgtgacctcaggtgatccgcctgctgtggcctcccaacgtgctgggattaaaggcctgagccactgctcccagccaactttgcctaactttttttttttctcgagaccaagtctcgctctgtcacccagggtggagtgcaatgctgcgatctcagctcactgcaacctccacctcccaggttcaagcagttctcctgccccagcctctgagtagccaggattacaggcacctaccaccacacctagctaatttttgtatttttagtaaagatggggtttcaccatgttggccaggctggtcacgaacttttgacttcaggtgatccacccacctcagcctcccaaaatgctgagattacaggcctgagccaccgcacctggccaactttgcctaatttttaagcctatcttgtatctggtgccacataatcagtctcctttcacagcttccttgtttaagtgactgcaaaatgttttctctttcattgtcattgtaccaatcagtcggtgtggctctccctgctccagatcctgaacaactacctccagtttgaggtgtcccacggcccctccgatgtggagtccgtgatgctgtccgggttgcgggtgaccgacggggagtggcaccacctgctgatcgagctgaagaatgttaaggaggacagtgagatgaagcacctggtcaccatgaccttggactatgggatggaccaggtgagctggcacctgcacctcctctggggatagacccttcctccggcccagggaaaaacagaatgaccccttgacgtgccaggacccaccagagaccttgtggatttggggaggcactttctgggtccccgcaggtgggcttctgttctgccctgtactgaggtcactggcatcttcctcacctccttcatccggatgccccgcccccggcagtcagcagctgacttcctccagctgcatttctcatcatgatgctgttggtgccttcagcagtggtttcttttagcaaagccatcttgagcaacacctgcaggctcagcaccatgtctttagggtactgaagtagcaatgctggggcccgtgccctcagagcatggatggggagcaaaactgggagagcagtgagacccaggtcctggacaggcctgtgagacaccagggagccacacatgtcccaggcaggcaggtggtggtatcccagacaatgttcggaacacttaaccaaactaggtttccacagtttgcaggcaggtaacccaagatgttgtctgtgaaatgcccacacacttaaggggcgacctgggatctccaagagctcttggagccaaggctcatcttacaacacagacctgggagtaaataggtgtgttccaggcacctgcctttctgggactggatctcagccgagaccctcttgggttcccacagtgttaatgagtgagcggatttccgttcactgcagtcttcctgactcgccaagctctctgtcacagcgtggctggtttagtgttgtgcccttgacggaggcgggacagttgcccacgttgaccccactggccgcctcagctaggctggggcatggacacccatcctctggcctggtcccctcgccctggtcatcacagccagcctcgctgtccagctgggcccagctctctctttggaggcccagatgtcctcaggctctgcggagtttgttgaagtgactgtttagacttccagtgtatccttcccatctgagagacgtttctaggatggtggatgcagcccccagatccccggcccctctctccgcacagaacaaggcagatatcgggggcatgcttcccgggctgacggtaaggagcgtggtggtcggaggcgcctctgaagacaaggtctccgtgcgccgtggattccgaggctgcatgcaggtgcgtgggggttgtggggggcggggggaggcctgcccctcacaggcagctccgaggctggcagcaccataggtggttccgttggtcaacctgttagctttcaacgagtgaagaatttgtctgacaggcatccccactttaacagctcctgtttcctcttcagacccattctcccctgcggttccccttggcatccgggccgtccctggcccccacagctccccaccgccatgccagccacctgcccctctgcctttgtgaagtgtcctgaatcgagccccttgccgccacccccacccagtccaaccacagacgtcacccaagtgggccccgtgcctgtcccctggagccaggggttccagctacggccgagggagctgctctgagtcgttcagctctcagccccctcggcagggacatccactcctcacgcccccaccgcgcaccccaggagctcaggctggcgtgccctctgagctcctcacccagccctccactgcactccggccagcaggccgtggggcaagaggaacaaccctgcccgccccagctctgtagataaatgaggcatcacagatgaatgcctcgcaagggaccagagaggtctcagggttcccttaacccctacatacctttccgggctcctgtagccccagtgccgtttacttaatgcagggagtgaggatgggggggacgcccaccaacgtcgccaccctgaacatgaacaacgcactcaaggtcagggtgaaggacggctgtgatgtggacgacccctgtacctcgagcccctgtccccccaatagccgctgccacgacgcctgggaggactacagctgcgtctgtgacaaaggtgggaccgccctcccggggcccttcagtgacagggaggtctcttatggctgaaacacaggaggggggctcagtttagacattagcgtccccagccaactccctgtggttccgtggagccctgagctttattttataacaagcgggcccctcctagagagagactctgagcctcttccttactcaaggcacagagtgccccaggcgctctcctcagcacatggggtgatcagcaaagaaacagtgaaaagtaaggccgggtgcagtggctcatacctgtaatcccagcactttgggaggccgaggtgggtggatcacttgaagccaggagttcaagaccagccaggcaacatggtgaaaccccatctctacgaaaaaaaaaaaaaaaaaaaaaaaagcaaaaattagccaggcatggtggcacgcatctgtagtcctagctacgtgggaggctgaggtgggaggatcacttgagcttcttaggcaaaggttccagtgagctgagatcatgccactgcacctcagcctgggcaacagagcaagactcttctcaataaataaataaataaaagaattagtgaaaagtgcatattaagaaaatcctccattcagggtggcctcagagttttgaggtgcttaagtcatcttctgctggtggccattccccatgtgtcctggggcagcctgggccccgtgttccaaggctctcaccctccttggggcagcccgggaaggccttcctctctgcatcactaagtctaacccgcctaacgctgtgttttcggggactctgtggcactcttcctcttccctctgctgagtaccagggaaagtcagatcttctggaggggacaggttgctccagatattttaacgtggaaggtctcgtggattgtgggtggaggtaatgctggctctgtccttgcagggtaccttggaataaactgtgtggatgcctgtcacctgaacccctgcgagaacatgggggcctgcgtgcgctcccccggctccccgcagggctacgtgtgcgagtgtgggcccagtcactacgggccgtactgtgagaacaagtaagagcagcccctggtgcctccctgcaccttcagagtccatgtggctgtgttccctcgactcagtgtcttctctttcttattttgacccaaagatatgtgtgattctgggtaacagggacatatttttttttaatttggcatgaattaagtgaaaatcaaattttttttaatttttattttatttttatttttttgagacagagtcttgctctgtcacccaggctggagtgcaatggcgcgatcttggctccttgcaacctctgcctcctgggctcaagtgattctcctgcctcggcctcccgagtagctggtcctacaggtgcccgccaccatgcccagctaatattttgtatttttagtagaaatggagtttcaccatattggtcaggctggtctcgaactcctgacctcaagtgatccacctgcctcagcctcccaaagtgctgggattacgggtgtgagccaccacgcttgggcaatgagaatcaatttggacgtctcaaactaaccccattggatcatgtgtccacacctgaaacatgcaaatgactcacctggagtcctcactgggcccagagcaaacaggccccatgagatgcagggagacgcatgtggtttacagagaatgctttctctgtcgagtcgctgggcttgaagtcatttctgatgtgtgcggagatcctagtgtggttaggacaggcagcagcgtgctctctgggctctgggctctgtaccctttgcacggggatcgctgggtacaggtgcgtagtcatcacaagcgtcactttgtccaaggtggagctgctgggttcttcataaaccaaggttccaggccgccgtggaggtgatgcccctgtggctcattgtcctcagctgctggtggccatcaggtgcagggacacctgctatgctccgttctttgtcctcccgagcctagagcaggtgctgtgatcccggctgtgaccccatgagtgggaagcagcctgtgccctggagctggtgacctcacgagaagatggcaccacatcattcttggatatcagcaagatgtgatgccagggagagcgccgcggaggtgccctgggagtggagagggaggtgggagccagtgtggctgaagcgggagggcattctgggagcgaaagcaacagagccaagctggagaggagtaaggggatgaggctgatctagagaggcctgggtggggacagaggtgggcccgcaagccaggaacagaattcggctgtgtggaggccgtgggggcccagcactaaagtggcaggacctggtcttagggaacccccacctgccgcatggagcacagcttggagcagggggagttgccaagaggctgatccagcatctccatgcccggcgccacagtcaccactgctgcagggggatgaaggttctggggcccccacgctgcacacacacatccataaacgccagactctatctctggcctggttgtctttatgaccctgatttgtacacagtccttaatacttgctcgccaagtgagtgaatgctagaggctggcagctgggtggagggaacttggttagccaggggggattgcaggagcccgcaggacactcgggcggggccgttgcaggcaggtgggccttcaggtgactgcgcaggtgcagccctgtcaggaacaggtagggagactcatgcacagcagcggccagcacctcggaggcctggctttgtccctgcagtgttgctcatcttcagtgtctgttgctctctgccgggggaggctcagggaggcaggactggcttctgctggattccgagtgcacgggcgcatgccgccgtcctaaggggcatgctacaccagggcatggctgccctgagcatctgtgggtctgggggccaggggacctgggggacaacaaaagctacaaaactccctgtttaggagcttcctgcgggcatctcatgctggcattcaccccaagaccactttgagaagttgtgccaggcagctgagctcagtctgcctggggctgcatcgtgaaaggccagccttgcagtgggggttcattgtcattaagccccaatgagtcaggcatcatgtggacgtggggcacacggtggacagagatgtcatcccagtcgctttgggcatggtggatctgtgggtggggggtgaggttgggagccggtagaggggagactgaggccatgtaacgtggaaggggaagctcccagagctggacccagccaggcctcctgggcaaccatctccatgctgcctgcaggcctcttctcattccagaaagcacagttacataaaccttccagctgccctcttattttccccacagactcgaccttccgtgccccagaggctggtgggggaaccccgtctgtggaccctgccactgtgccgtcagcaaaggctttgatcccgactgtaataagaccaacggccagtgccaatgcaaggtgaggccccgcccccatgatccctgcatgctgtgtttgctcacacacatgcacagctgcccctaaatacacacacgccttcacataccctgtcggtacacactcacacccctgcacacacacctgtgcccactcacatcacatttgtgtacagatgtggtttttggtttccttgctgctcccccgtgctctgtgaatactccatggctgctttccacgtgtaaactacgggttcagccctgccagcccccgcccgtggaacaggaatccctgcctcctcccggcctactgcccatggctgtgggaagcccacccgtttctgagggctggctcatctatggcaccaccccggccctcctggcctcctggttggccattttcctggtctttttttttttttttttgagacagagtctcgctgtgtcgcccaggctggagtgcagtggtgcgatctcggctcactgcagcctccgcctcccgggttccagcaattcttctgcctcagcctcctgagtagctgggattataggcgcccaccaccatgcccagctaatttttgtatttttagtagagacaggatttcaccatgttggccaggctggtcttgaactcctgacctcaggtgatccgcccgcctcagcctcccagagtgctgggattacaggcgtgagccaccgtgcctggccattttcctggtctttaccaagctggtgtcccatgatgacagcagttttaaaatagaaagtgtcactaagtgcgttatgccccacgcctgtccagggcggtcagtcctaacctgcatgcagcacggagctcacatctcgtgtctccagaaatgcacacgcgttctcagtgcagactctagggacccctccccagccctctcaggatacatcacctccttcaggatcttcgtgtacaccacggccatggcgctcacagtgacttgaaacccaaatgttaggtctgagggtaacaggagcctgggcgagggacgtgagcttcctgcagatgcggctggccctaggagggaagctggtaccagggcacccttggatgccatctcgtgatgtcagtagtgtccccccccagtgcctgcggtggttccaacagcaaatgggacttgtgtcctgaaaggctcaaattaaacagctctcctgggtcagggtcggtccacacgtcaccagatggcggtggtggcatagtgggtggcagagcagagagaacatggggagtgcattggcgaaaacttgcctacgatttttttctcatccaaagttataggcagggcgtggtggctcatgcctgtaatcacagctactctggaggccgaggcaggagggattacttgagcccaggagttcaagaccagcctgggcaacatagtgagactcccatttctacaaaaaataaaaacattagctgagcgtgctgatgcttgcctgtgatcccagctactcaggaggctgaggtgggaggatcacttgagccctggaggttgaggctgcagtgagctgtgactgcaccactgcactccagactgggcaacacagtgagaccccatctcaaaaaaataaaaaaacaaagttatacaaaatgtaataaaaacccataaagatcgcagtcaccccatgcgcctcccagctgtgattgttagtgttttagcatctcttctgggcctgtcgttcactgtcattttacacacagtcggagtccccacctgacacacaggtctgaacgttgctcacgagtctgcccaagtcacagcctggtcacagcctgccccgttttccggggcggggttgagggggtgctacttgggcctggggagtcccggtgaccagcccaggcaatgtagctggtaaacggcaagggtcaggcatgaacccaggactttctgaacccgaagtacaagctcttgattgtcaccctgacccacccaatggtggacgttcaggtggcttctaatttttcaaaacaactttaaaaaaacgcccaagggctatccccatacgtaagcctccatttggatctctgattctttttaggacaaatacgaaggtgcccactgttgagacttgttaagacatgagggagggcgtgcttcccggaagaactgctctcctgggtccggccttgtggggccttgggaggcagcccccgttgggtgtgggatgtgggcagagggtagccatgaggggtgggatggctggcggccaacacacacacccgggtgggagtctggacgtcgctcgggaaacacgctgcaaggtagggcctctcccgggcatctgaagtcacaggccctgcctctggcttttgcaggagaattactacaagctcctagcccaggacacctgtctgccctgcgactgcttcccccatggctcccacagccgcacttgcgacatggccaccgggcagtgtgcctgcaagcccggcgtcatcggccgccagtgcaaccgctgcgacaacccgtttgccgaggtcaccacgctcggctgtgaaggtccgcgttgcccctcgacaccctgcaggttacagcgcggggacaggctgctgcactggcgtgcacgtgtgtgcatgcacgctgggtgtttgggggaccctgggctccctcgtgttctgagttctcttgaccttctagaaacctggttctgcgtgagggggtgtgggtcagagcctggtcacccctctccagctctgacatggatgggggcaggggagatgctagggttcggttcttggtgggagcagggcctcctgcagggaggcgcatgcagacagtggtgcctgtttgtggtcgtgggtgtggcgtgccccgctgagcagacttctctcttctctaccccagtgatctacaatggctgtcccaaagcatttgaggccggcatctggtggccacagaccaagttcgggcagccggctgcggtgccatgccctaagggatccgttggtgagtcgccgtggcctgtgtgtagggaactgaggcaggcgtccttgtgggaggagccagtcgagatgtggggactcatggaatgtttcgtgttgaaaaaatatccgcaggcaaagtgctggggagaaatccgatcgccttttccctaccaggaaatacacaaagcaggcagagggcgcaacagaaacatgaacagtgcagcgcgtgtggggacgcccgccagtcaggcccggccagtccctgctctgccgctcaggctggggcaccgggacaagtggcttcactgttcatagcatcgggttacctctgtgaaatggggacattgactgtgtccactctgtgaggggcgtctggaaaatccagtgaggcaaggaaaggcccagccgaaatggattcctggtgcatgggatcgtggctgccggcagatggtgttgctgatttctttcctcacggacttgctcggaagtgctggctcctgttggctgggctcccgaaacgcctggttgtcagtgtcagagcagcttcggccgtggccctgacatgaaagaggggcgctggtgtcgacctcctggcccccatggggttctaaccaccacgcagtgttctgggtttaagtatattcagattgtggattgaaatacacaagcattgatcaacagtttgagtttcaggctttgcacacctgctctccttccccaggaaatgcggtccgacactgcagcggggagaagggctggctgcccccagagctctttaactgtaccaccatctccttcgtggacctcagggccatggtaggggcgcctcggggatgtgtgttcagcaggggcacgtgtgtgttcgtgtatgcgtgagagagtttgtgtgggccgaggctcctgggctggggagtgttggggcggctgggatggcgcagggacagccccacgggcccgcagcctggagccagcaggttcctgtggacttcggggtgttggcacctgagccaggcacccccacgtggacttctctcccccagaggacccagctctgtgtctttggttctgaaaacacggggtccctgcatttgactccatttgccctctgatcctgccctatttcatggcttttgttcccacgtctcccactcgctatctttctctgagccctctttggcccaccagaccctcgtttccatggtctagctgtcagcagtgctcatttttgggctttttgttttttgtttctttttttggagatggagtctcactctatctcctaagctagaggacagtggcacggtctcagcttgctgcaacctctgcttcccggattcaagcgattctgcctcagcctccctggtagttgggacttacaggtgcccaccaccacaccctgctaatttttttatttttaaaatagagacatagagtagagtattttcaaaatagagagtagagacgggttttcaccatattggacaggctggtcttgaattcctgacctcaaatgatctacccgccttggcctcccaaagtgctgggattacaggcgtgagccaccatgcccagccaggcttttggattttttaaagttcctttctgacaaggaaacttgcaccagacagtagtgagttgctgagtaacagcagggactgaaagcggccgaagtgggtttgcacacatcacgactgcctccctgttccagaatgagaagctgagccgcaatgagacgcaggtggacggcgccagggccctgcagctggtgagggcgctgcgcagtgctacacagcacacgggcacgctctttggcaatgacgtgcgcacggcctaccagctgctgggccacgtccttcagcacgagagctggcagcagggcttcgacctggcagccacgcaggacgccgactttcacgaggtaggcgggtggccgccaccctggctcggggacactcggggacactcggatgcccgtgggtgggtgctgtggggctgggcgtctacctcagttcgtggaagacggttgtgtccaggatccccatcctcatttctcaaatgtgagccctggcgggtgcagtgcctgactaaactgacgacgagcgttagggagtgttctggaaggaaacatgcaggtcacagccttgctggtgatcctggtagtgcctgtagtgtgatctaagtggcttctaagggattctaagtggcccacctgcatcagcccctctcccttccatgcagcctgtgatggagtatcgtccacccatttgacaggtaaggaaacagaggcacagagagctaaggcgtttgcccaaaggcacagcttgtaaggggcagggcccggcagtgggcccccatgtccactcccacccgcagctctgaggtcctgctttcagagggccacacctccgcctcaaccctctggctgtgtgtgtggaagttgtcatcccctgagcagtatcgttttagggtgaatgcagaggggactcacgcagcctgatatttggaaactgctttcgggggctccagaagtttcgttgtggctctgctgcaggcctcttcgtccagacaggacccccagaggagtgcctgtccacacagagcccatgggggacaccctgtccctcccacccatccccacggagccctcagggacctcctcatccacaaagggcctccagtccatgcagggcccccatggaaccttctagtctgcataaggccgccagagaccaggcagggtccccttgctgggatttgagtcccagcctgagagttgggccagtggcgtttgttctccatgcgtgactccacaaacaagtttcctttctggtttctttttctttatttctttttttttttaagatggggtcttgctctgttgtccaggctggagtgcagtggtgcgatcttggctcactgcaacctccacctcccgggttcaagcaattctcctgcctcagcctcccaagtagctgggattacaggcgcccgccaccacgcccggctaatttttgtatttttggtagagacagggtttcaccatgttggccaggctggtctcgaactcctgacctcaggtgatccacccgcttcagccacccaaagtgttgggattacaggcatgagcaaccgtgctcagccctggtttctgtcttgggtgtggtccccaagcccctgagcacagcctcatgcctccacccagtctttcacacagaccctggggtgcacagaggctgagggtcaccctcggaggagctgtccacatgtccacggcggcctcagtgtgggacctctgcgcagcccaggttgtggtggttccatcactgcttgacgtggttggtggagttcaggaggagttctgatgtaataaccaggggcatcgccacatgtcttccctgccttagcgtcttggggtatacgtggaaaaacccctggcagggctcactctgccagagtcccagcctctgacatttgaatcacccacagtctctctggcttatttgatggggttcaggatttatgaaaatcacacattaaaaaatgacttctggccgggcgcggtcgctcacgcctgtaatcccagcactttgggaggccgagatgggcagattgcctgagcccaggagttcgagaccagcctgggcaacatggtgaaaccctgtctcttctaaaatatgaaaaaaatcagctgggcggggtggtgggaggctgaggcacgagaattgcttgaacccgggaggcagaggctgcagtgagccaagactgtgccactgcactccaggctggacaacaaagtgaaactctgtctcaaaaaacaaaaacaaaacaaacaaacaaaaagacttccttatctatttgaattcaactttgattaatgtttgatcctatttataaacttagaccatgaaattcccctaagtattttaaatggaattaatatatgtcatgtagttgattttttgttttgtatttcaattgttcggctagcaaacagaccttccaagcatttaagcagtgcttgtacatctagtaaattaagctaagaatatgaagcatctttaattctctagattttaatatactttgtgagcttagtaacatttttttattcctcttaagataaactttttgaaaaaatatttgggaactaggccaggcgtggtggctcacgcctgtaatcccagcactttgggaggccgaggcaggtgaatcacctgaggtcaggagttcaaaaccagcctggccaacatggtgaagccccgtctctactaaaaatacaaaaattagccgggtgtggtggcacatgtgtgcctgtaatcccagctactcgggaggttgaagcaagagaattccttgaacccaggaggcggaggttgcagtgagccgagatgacaccactgcattccagcctgggcgacaagagcggaagtgtgtctcaaaaaaaaacacaaaaaacaacaaaaaacaaaaaacaactaatattaaagagcacagtctaaagtgtagggctggaatgaatgaatgagcccactaggcaagcaaaggctttcagggcaggtgtccctccgtcccacgagccaggcctccgcaggctgagtactgagtgctgtctgtctgaccaggacgtcatccactcgggcagcgccctcctggccccagccaccagggcggcgtgggagcagatccagcggagcgagggcggcacggcacagctgctccggcgcctcgagggctacttcagcaacgtggcacgcaacgtgcggcggacgtacctgcggcccttcgtcatcgtcaccgccaacatgagtaaggcgctggctgcgttgggggtggaaccctgctaccatcaggggtgtgccccagagctaggcccccatggggtgaagcaggtgggctcccggcccccccttggccatgctcttagaaaaatgattgtgaggccgggcacagtggctcatacctgtaatcccagcactttgggagatcgggacaggcagaccacatgaggtcaggagttggagaccagcctgggcaaaatggtgaaaccccatctctactaaaaatacaaaaagtagccaggtgtggtggtgcatgcctgtaatcccagctactcaggaggctgaggaaggagaatcacttgaacctgggaggcagaggttgcagtgagctgagattgcgccattgcactccagcatgggtgacagagcgagactccatctcaaaaaaaaaaaagccgggcgcggtggctcacgcctgtaatcccagcaatttgggaggccaaggtgggcggatcacagggtcaggagatcaagaccatcctggctaacatggtgaaaccccgtctctactaaaaatacaaaaaagtagccggtcgtggtggtgggcgtttgtagtcccagctactcgggaggctgaggcaggagaatggcgtgaacccgggaagcggagcttgcagtgagccgagatcatgccactgcactccagcctgggcgagagagccagactccgtctcaaaaaaaaaaaaaaaaaaaaatattcggcaggtaggcctctgtttcctcatctgtaaatggagcctttgggaagacagtctgtgatgacgtacccgtggctcccaggggacaggtcccgggctagggagatgttgggccatgatcttgggggtccggcagggcttccaaaccctcaggtgtgagactctagaagggtgggtgtcgaggaccccgcctcactccaggctcactgtagacaggtgtaagtacaggcgggatgcaggaagttggaagtcagttctgttctaaagatggtcagtcagctgggcgtggtagttcacacctgtaatcccagcactgggaggctgagatgggcagattgcttgagcccaggagttcgaaaccagccaggcgccatagtgagaccctgtctctattaaaaataaaaaataaaaattagccaggtgtggtagcatgctcctgtattcccagctacttgaggctgaggtgggaggatcgcttgagcgcaggaggacgaggctacagtgagctgagattgtgctactgcactccagcctgggtgatagagtgagatcctgtctcaaaaataaatataagtaaataggctgggcgtggtggctcatgcctgtaatcccagcactttggaaagccggggcatgcaaattacttgaggtcaggagtttgagaccagcctggccgacatgatgaaatcccatctctaccaaaaatacaaaaaattagccaggcgtggtggtgcctgcctgtaatcccagctacttgggaggctgaggcaggagatattgcttgaatctgggaggcggaggttgcagtgagctgagattgcgctactgcactccagcctgggagacactgcgagactccacctcaaaaataaataaataaatatggccagccagcgtcagtgtgacagttgtggtcattttgaaaacagcaggggttcaagaaagccctgggagttatgtctgattaaaggaactgtccccccagttcttgctgtcgacatctttgacaagttcaactttacgggagccagggtcccgcgattcgacaccatccatgaagagttccccagggagctggagtcctccgtctccttcccagccgacttcttcagaccacctgaagaaaaaggtaaaaccgcttagaaacctgctgctgccctcggagtccccagcgttcagggaggggagggccccgctgcgggcatcgcaggacctgcgcactgaagatctgggccagagtgttccgagtgctctctggtgccaggtcctgttggtgacagcaggttgttttgttcaagtgctcaggtacaggctgaacatcctaatcctgaaatctgaaatgccccagaacctgaaccttcttgagcaccaacctgacacttaaaggaaatgctcattggagcgtaagcatgaaacaataaaaaaatcaaaatccaggccaggcgcggcggctcacgcctgtaatcccagcactttgggaggccgaggcgggcagatcacctgaggtcaggagttcgagaccagcctggccaacgtggtaaaaccccgtctctactaaaaaatacaaaaaatagccagctgcggtggcgggcgcctgtaatcccagctactcaggaggctgaggcatgagaattgcttgagcccacgaggcagaggttgtagtgagccgagatatgccagcctggtaagactccgtctcaaaaaaaaaaaattccaaaatgttcccaagcatttcagctgagggatactcagccatgtaattgataatgtcagaaagaaaagagaactgaaatttgtatgtgagctggttgtctttggtgtgcagtgaaaagctgcttctagctgggcgcagtggctcatgcctgtaaccccaacactttgggaggccgacacagggaggattgcttgagcccagaaattcagaaccaacctgggcaacatagagaaactccatctctactaaagaagttttttttaattacctgggcatggtggcgcatgcctgtagtcccacctactcaggaggctgaggcgggaggattgcttgagtccgggagatggaggctgcagtgagctgtgatcgtgccactacagcccagcctgggcagcagagcaaaaacctgtctggttggggggaaagctgcttctaaatagaaataggcattttagaatcaccttccccttcccgcaaaaaaacaacaacaaaaaagccagaatgctgtctgtgtatgaacaaatcttcaatcctgggttgagattatgattcaaaacagtttgaacattttgaattttcttaaggtgcttttttacagatccatgacaattactaaaaccttccccaaataaaaaggacgtgaaaaggtaaactctgtaatggacagtttaaaattggaaatgttgttagtaaatggattttgtcaggtatatgatgttatctcatgtgtcttaaaaagaggggtgactctgatgtggggtcatgcttgaaactaagaggacgaggtccctgactctccattgcagccagctctctctggaactaatagagtgagaactcgctcattaccaagggcggggcaccaagccattcctgggggatccacacccatgacccagacacctccgaccaggccgattttcaaccctgatcacatttcaacatgagatttggaggggccacacatccaaactgcatcagatacattcatgtttaaacagtccatctccagaactctttccagcctgcagatctgaaactctagcccacgaaacactaactctcctccccagcccctggtgcctaccgttctttctgtctttgaatttgactcctctagggacctcctgtaagaggagtcacacgatatttgtccttttgtgattggcttatttcaccgagcctaatgtccgctaggttcacctgcgccgcagcaactgtcagacttcccctccttttgaaggctgagtaatattccattgtgcggatggagcgcgtgttgcttatccactcacctgttgacccatgcctgagttgtttccaccttttggcctgtgtgaatggtgctgctgtgaacatgggcatagaagtatctgggtccaggccgggcgcggtggctcacggctgtaatcccagcactttgggaggccgaggcgggcggatcatgaggtcaggagatcgagaccatcctggctaacaaggtgaaactctgtctctactaaaaatacaaaaattagccaggcgtggtggcgggcacctgtaatcccagctactcgggaggctgaggcaggagaatggcgtgaacccgggaggcggagcttgcagtgagccgagatggcgccactgcactccagcctgggcgacagagcaagactctgtctcaaaaaataaataaataaataaaaatagaagtatctgggtccccgccttcagttccttggggtgtatacccagaagtgggcttgcagggtcatgtgataagtcctgtttttgattttttggggacccacggtactgttttctgtgggacatctgttggtttttgagaagcacctgctggcactgacggcagtcttggggaacacaggtgctcctgccagagtcctcaccttctgctcacattgcagaaggccccctgctgaggccggctggccggaggaccaccccgcagaccacgcgcccggggcctggcaccgagagggaggccccgatcagcaggcggaggcgacaccctgatgacgctggccagttcgccgtcgctctggtcatcatttaccgcaccctggggcagctcctgcccgagcgctacgaccccgaccgtcgcagcctccggtaaggcctgggcacggggcacacggggagggcccgttctggaggctcctgaggcttccacaggtcaaaatcctgatcctgatcaagcacaggtcttcacagtgacatttcaccgtgaccctggcccagagacagagaccattgccttgtggtggtccttggagggagattctgggtctgccacaggataccacaccctggaacattgcacaccctttgcctgggctcatcctggtgtttgtgccagaaatgccccctccccagcatacaccccatcttgtgcccagagggaccccattctgtccccacacacctggcccaaggctgtcatgggtagtgcctgctgctggccccggggttaggtctgctcagctagtcctggctggaaaggatgaatgtcccagaagcagctttgcaacctgctcggtgggagcagcccaaggctccgccctccttcttcctgccatttcccagatacttccctggctctgggatcctcgtgttcacgtggttctcagtgactgggtgattcatccccatgagctgccattattttggtgtcttttgctggacactgaaaccatcccctgtgattctgccattagctattatgggctgtgacatctttgcacctgtgccttctctttctttttaaatttctgaagtcccaatttgacccaaaggtgacacctctctctgtgtgccctgtcagtgataaaacctgctctagggatgaagatactgtggggtccgtgggtccgagctctcggagtgtgattctgtctcccctagaaacacatcatggcgtgtcctcagggcatttgtgcgcgggatttaagcagatgtttcctcaccgtgtttgtccccatgctctggcttcttgacctcaggttgcctcaccggcccatcattaataccccgatggtgagcacgctggtgtacagcgagggggctccgctcccgagacccctggagaggcccgtcctggtggagttcgccctgctggaggtggaggagcgaaccaagcctgtctgcgtgttctggaaccactccctggcgtaagtgtgacgccaggagccccatgtgagggctttgccaaggcagagtgcccccgcagggtcgggggctcagtggcagagcgccccaagaggacggtctcttgtggtctgtgtttcccctttaagtcccccgtgggggcagtgagcctcctgctctgcttctgtgggaatatcagagtcctcccctagatgtccacacacagatgcacacagacctgcacgtggagatacagatgtgcaggcgcacagagagatccctcaaggctgacacccaggaaggggacccctcacctgcgggactcccgacatgcagcggccaacactagtgtagtgcccagttcaccgccggataagacaggcccattccggtcacacacgggagacagaacccagagactggcctaagagcccatctgctgacggtcttgcccgagaggctgacacagtctagctgtggggactggcttcacccccaagaggccacacctggccgcagcacagtttatctggcccgtttcagaagcagcgtcagagagtcacagagtggcgaacgcaggagaatctgtgcgcgagaatctgtgttctagcatccatgcaagcgagggaaaggcgtttcgtcgttagaaaaatgcaaaatgagtgattctcacccacacgtgagactggattcagcaccacagtgtggctcccgtctgctgggagccagtagtgtttgtgctttggttttgctttttagctgcagagttcacgtgaggtgtggacatttgagttgctctatcgttacagggagcttgccttttctctgctggttggttttcacttttgctgtctctgtttagaagaaggcactggaacgggggtgtggtgggaagggccctgttgccgggatgggagcacagtcagggaggggaagacccactgcctccccacacaccgggagggagtgccgggaaggggagacgccatgcaggagtcaggcttgaatctgcggagcgttgtgcatctggggacgtctgtgcagcaggaacgctgcccccatcacagttgccctgggcacagtgaggagccgtgagtgggggctgtgctgggggtggcgctatggtgagcgagcccggttagcccagcctcattcttctcctgcttctgtgctttccaagttctagttaataagcaaccagcatggcacctggaatgtagtaggcgcttggcttataaaagagagaagaaaggaacccattccaccacgacggacgtcaggcccggctgtctgtcttgggcattcatctgcgtcctggcaattagctccagctctaatgacctgctctctgctttatgttgcacttattattcccagattgtaaagtttgtgccaaacatattaatgctaacatcccattttacagattagcaaagtaaggatctgagaggttatgtgatttttcccagagtctgcgagggcagggccctgtctgaagctgagacacaccttataacaccttgttatttggggcttcccatcagtaaaacgggagtcataatggggccctggcttctgggcagttcccataaaacattgtgcaatctgaagatgaaagtgtcagaggaaggtgagatgtcctttctgagagcgtctgccctcagaaggagacgggaccgcatcgcagctgtgtgaaccccgggcagtggttccagcagcggggcggacgcgagacagccccatttgagttttgctgctagatggcacgtagaacttgaacttcagagggtgctccttggaggccctgaccagacacagaagggaagggagactgttcccatggtcctgcctccgcggcagtgaggctgctcttcttacagccaggtggctcttgtcttcggtgtagggggctggtgaggaacacggtggggagcagcctgcgagggcgctgggctttcagcactcacggcacctgctgtttggtttggccaggatggcctgggagcccccagggctgggcaaaggctgccctttacagactcatgggcagagggaaccgtcttacccctgccccttctctgtcctctccgcagcgttggtgggacgggagggtggtctgcccggggctgcgagctcctgtccaggaaccggacacatgtcgcctgccagtgcagccacacagccagctttgcggtgctcatggatatctccaggcgtgaggtgggcatcctcccgtggccactgtgccctctgggcctaccgccaaacctgcccctcccccccaaacctgcacctccccgccaaacctgcccgtcctcaaacctgctgagcctgcccccaaatctgtcccctcctcaaactaaatcttccattctaagtgcttggaacaaaacaaatcaaccgattaaaacacatattcgaggattggccagagtctgaggatttccataacaaagccccattataagggttttcagagagccctggttatgtattaaaccccggaatggcagacccaaagctcaggctccgaggagctctcggaacctgcccctcacttcagtgcgggtctgttggacggtgccgctccccacctgctttgatcctaagggaggtgacagctgctgggcgctctccctcggggccacacgcagggcagcaggacaaaaggctgggcggctaatgtttaacctctggcattttaagcggcctgggaatgtgagccggccattgtgggctgcagatgaattggggaatggcccgagcgctgtcctggcctcccgttatccagacaggagggaggtgggagccagcctggccatggcctgtgtgggaccctggggtctaggagtcagaaccaggggcctgggtagcctcccccggcccctccccggggttgcactgtggctcaagggcccaggccactgtcctttccgagggctttttgatgtgaagtggccctggtttctgtcacattcttggaagggtgagtcagccctcaggcggggctggaggagggcagcggcctcttgtgcaatatgcaggtgaagctgacccgcctctgcccctgtctcatgggcaaatgtcactccccagcaggacccagcctggagacggggtcagtgattagtggagtttgttcatatgtgggcggggttggggcttgtctcatggccaggatgccaggtgacatgtgggccaaggaagctgaaattgaggcagaagaaaggaggctggagtgagagtccgaggctcccatggcctgggcgccccaaagccagaggtctctgaacggcccccaagccagtggagggagcctggcgtgctgccgcaggccccagggatgcccagggcccagggcattgaaggagcctcaggaggggcagttccaggcccagagccatgagcactcggcctccccagcccagcctgatcctgccagccttgatcgtttcataagcaagtgtgtaatttatctctgttatgcaatgaccagatctgagcctcggcccttaccttctctcctgcctttaaccctcctgcccatagaacggggaggtcctgcctctgaagattgtcacctatgccgctgtgtccttgtcactggcagccctgctggtggccttcgtcctcctgagcctggtccgcatgctgcgctccaacctgcacagcattcacaagcacctcgccgtggcgctcttcctctctcagctggtgttcgtgattgggatcaaccagacggaaaacccggtatggccactctgctcccctccccactgtctgggccgcagcttggagcagctaccatagtcctgtcctggccactccaagcaccctggctagctcctcctcaccacccccacctctgcttcacagatgccctttcaggaacgtgcctggtcacaggctgtgggtggagatgtgggattcactggcaggcccaagcactttgactctattgggagatggggggccctttctttctttctttctttttttttttttttgagagtctcgctctgtcaatccaggctggagtgagatggcacaatctcagctcactgcaacttccacctcccaggttcaagtgattcttgtgtacatccccaggaaaatacaactcttgtcaaaagtgatttaagggcagtggctcatgcgtgtaatcccaccaggatccctttgggaggctgaggcaggcagatcacttgaggtcaggaagaccagccttgccaacatggtaaaacccaatctctactaaaaatacaaaaattagctgggcgtggtgccgggcacctgtaatcccagctactcaggaggctgaggcaggagaattgcttgagcctgggaggcagaggttgcagtgagcagagatggagccactgcactccagcctgggcaatagagcgagactgtctcaaaacaaaacaaaatgatttaagatgtagaaagactaaatagtcctctcaccgttagagaatttgcattgcagtataaaaaccacggccaggttgggtttatcttaggaatgcaaggatggtttaacattttaaaaatctatgaatgccatttacctcaccagtacatttaagggaaaaatattatttttctcagaaatgaatgtacaaaagaattttgataaatgttatgctcattaatgattagaaagaaagaaaaacctttgaacagactaggactaggggaaactttaatctaatgaagacatctacagaaaacctgcagttgcaataaataacaatgggaagatactggaggcatcccctgtaacatcaggaacccactcacgttcaccactgtggtgcagggtggccttgccagtgcaatgaataaggaaaacaaaagcatagagatcagaaaggaagaaacaaagctgtcattattaggtaacatgaaggatctcatagaaaaaatctaaaatagtctacaggcacgttatgagaaacaattaggctgggcacgttggttcatgcctgtaatcccagcactttaggaggccgaggcaggcagatcacttgaggtcaaggagttcgaggccaacctggccaacatggtgaaaccctgtctttactaaaaatacaaagattagctgggcatagtggtacgcacctgtaatcccagctacttgggaggctgaaacatgagaatcgcttgaacccgggaggcagaggttgcagtgagctgagatggtgccactgcactctggcctggacaatagagtgagaccctgtctcaaaaaaaaaaaaaaaaaaaaaagagcctggcagcaggtggacgacgggcagaagatcagagcagtctgataatgcgcaggcctgggaggtggggtggagacccagaactgaagccagggcactgggcacggggagaaaggagggacaggaccaaccggttatggagcaggcaggaaggaggagtcaggggagtttgacgtctccagaagggagaatgagtagttgaaggtaccacccattgagaggcagggtctgggtgagatgggacacctgcagaggccaaggaaggtgtggcgcatgagccagggaggccgcctccaactcgtgggtggagacggtgtctgtggggctggaccggccctgggaagggaaacggaataaaaagaccaggctggaaccttccggcgagctgctcagggccacgtgcagacctgagctgctcctccttttttacggcaagcggtgggaccagacccctcttacctcaagagggaaggcaggcacccccacctcgcaggtcacccttgagaagcctccatggcttcccagcagtggtaggtggagcaccaggcctggcccatgaaggacgagccccgaggcgtgtgtcagaccagccagggccaaccttccccgccgcctcccaggtgcttcccgaggccgaggccccgggctggcgggggctccgtgtgcggggcccatatggcagggtcgctgctcctgcggaggggtttcttcacatccgcagccgggcgcatccccgcaatgggcacgttctcatccgcgcattggtctgggaaggctctgagaagtgtgcggatttcatctcaaaacccctctagtgtgcttttgagtggcgtgaatgggggagaggggagtcggtgcaggccactccctgcaactcaacaccccagcgaaactgaggcggcccctgggttcccacactgactcgtcgcctgccggagtgagcgctgtcccggcagccacgcacggctgagcatggagaaggaaagggcgacccggcagcgttctaggggcttggcagagtgcctgggctttatggtttttttgtaaacccacaatcctatctctgggcgaggtttttcatctctcagagcgctggcaggctgaaatgatttattatgcatccgcttttgtctttgttctatttctggaaaaggtggtacattggttagggaagcaggtacgaccctgctgcagccaggatggcacagccctcgcactttgttttcaaaaggtggtttcgtgggtttacttttcgcattacttgaagcagccatccagccaaccaaccttctcacccccttccttttcctgagccagtgtgatttccactcaggaaaccagggtgtttggtgtagagttctccagccacacgctcgcgcctcctttcctgaccgaggccacagtctgaggcaaagggcctgtctctggcataacttgagcctgcgttccctgcttcggttcctgctctgttccgtatctgacagatgcgatgctgacttggggccctccccacctcgggggcgttgtttctggagggtggctggcccttcgaggctgatgtgtcagcaggggcacccttagggtgccgtgacccagtgcctgagcaaagtggccttaagcctggggttgaggcgggggccctcgttctcctcctacgcttctgtgtctgttaaagggtatctccctgggaccccctggtagggtggactgatgggatggctgctgaggattagacagtgtgtccagagcaggccggttgggggtggggtcagggtggtgggaccctcccattgctcctattgctcccattgctcccatctcccccatctcccccatctcccccttctcccccatctcccccatctcccccttctcccccatctccccattctcccatttggctggttcagcctcccgggacccagaggggagcctgccatcctctcccagctggcggcagctttgggagcactggctggggcagcctctcccagagcactgggcacgaagctgcccctcccagagcgctgggcgtgaagctgccccccccaccccagagcactgggtgtgaagctgcccccccaaccccgagcactgggtgtgaagctgcccccccgccccgcccagagcactgggtgtgaagctgccttggggccacatcttcaagtgcagttccggggcatgtgggactgggtttgtgttcatggcctcagagactagtctctctctgtcattctcacactgctttctgtgtccaggcaggcagggctggctcacctgctggctcagctgctccgtggatgttgattttcaattcctggctctcagccattggccagacatgtagccctgctcagctgaggacagacacatagggtggtccgaattgtgagctctcccatcccccacccctcactcatgcctgtctgacctcagcctgggatgcaggggcccttgctgagcggcccctccctgcgcagtttctgtgcacagtggttgccatcctcctccactacatctacatgagcacctttgcctggaccctcgtggagagcctgcatgtctaccgcatgctgaccgaggtgcgcaacatcgacacggggcccatgcggttctactacgtcgtgggctggggcatcccggccattgtcacaggtgaggatgcacagagtggccctgcataaaaccacagatttccaacagaccccagctgtgcaggaacgctgccctcctttctcttccctgcccagccccaatgcttgtccagcccccagcagaggaggcctcggccctgcacactgcgagtgcatgcacaggggcactcgcagacacctggggcgacgtcttctgtgaggtgtgagctcattgagagctgggtccaggtctgttcagggttatttctgcagcacttaacagacaaaagttccacgtctacacatgggagggatggagggaagagcgagtgagtgcatgagtgtgcaggtggatggatggaggggtgagtgagaggatgaatgggtgggtggggggtgagtggatggatggatggggggtaagcgagtggctggatggatggggggtgagtggatggatggatgggggtgaatgagtggatggatgggtggaggggtgagtgagtggatgggtagatggggtgagtgagtggatggatggatgggtggggagcgagtggatggatagatggggtgagtgagtggatggatggatgggtggggagcgagtggatggatggatgggggttgagtgaggatggatggatgggtggaggggtgagtgagtggatgcatggatgggtgagtagatggatggttggaggggtgagtgagtagatggatgggtgaggggtgagtgagtgggtagatgatggatggatgggggtgaatgggtggatggaggaatgagtgagtgagcagatggatgggtaggtggatggagggatgggattagtggatgggtgggtagatggatatagggatggagagacgagtgagtagatgggtgaatagatggatgagtgggtagctggatggatggaggagtgagttgagtggatggatgggagggatgaagggctgagtgagtgagcagatgggtgggtgggtggatggagggatggagaggtgggtggatggatggatggatggatggattggataagtgagtggatgaataggtggatggatggagggatggagagatgagtgagtggatggatgggtgggtggatggatgggatatgtgagtggatgaataggtggatggacggatggagaggtgagtgagtggatggatgggtgggtagatggatggatgggataagtcagtggatatgaataggatggttggagggatggagagatgagtgggtggatggatggatgaaatgggtgggtggatggattggtagctaatggatgacaatgaaatgagtaaatggatgggtgggtgcagtgggtggatgggatgagtgagtggatgaatgaattagtgaatcagtgagtagaacaaacagtacttcctcagcacacattttgcttaaaatcagaaagttggtttgctccctactgagaaaaatctacctttattcacaaaaagaagaaccccttttcctgggtaatccctgggttctggggattagacgcagtctgaggccagaggcactggggtgggggggtgttgctcccagggcagcacccagcagccacctggggccagtgccatggtcacttgctggaccgtcctggtctccacagcaacgtcactgaccagcctccaaccaggcaggctcctggctagggtgttctgatgtgactcatctcccttactctaagggaccctgaagaacctttttcacctccacccagggccactgaggtgggggcaggttgggcggggtggcagccgccacttcctgatgtgacagggaggcgataccttgcctagattaggtgcttactgtgagagacgctgagatgaagaacatggcctagaaaggggctcgtatggctttgtcgaaaagccacctcgatgtccaggcggagcaggtctctgcgatgcctctgccctttggactctaaatccagatagttcacgtttcctacttgctttaaaaacaggtttcggtttgttttgtttaacacttaggtctgtcttgtacaagatcttaaaataactcccggggagcctcagactgagctgcaggcactggtcactggctgctgcctcccccggccatccagggcttccctgactgtcctcagtggtcctggttaactggctcctccagagggcagtgggaagtgctggagggtgttaaacaggagggagctgggatctcttcaatatttaaataaggagagtggggaggagcatagcctaggccagggtggggcaaggggcacagaaagaccaggtctcacctgctggttgctcctgtcccaagtgtcaccttgatgctctgcatggacaggcggatctggtttgtcacactgtggctgggagtgacaactgtgcttcagagcatttcttcctctatctaaacaagcagctcgtatagcaggctcggtggtgaggcagtttcgggggtgtgtgtgtggtgtgcacgtgtgtatggtgtgtgcctctgtggtgtgtgtgtatatctgtgatgcgtgtctgcacacggtatgtgtgtctgcatgcatgtgtatagggtatgtacatgtgtatggcatgtgcacgtggttggatgtggtatgggggtatatgcgttcctcacccgctcacatatggccctgtaggtgacgccgtcctccatctgttttggagcctcatcccttgcaccttgggtccatcatggcctcctgacctctacatggcccagctggcagggtcctcccaagcaccgtctgccttcacgatccctcctgcaccatctcactgccaccctccagggtctctggtcttcctcagcagcccccggcccagatacgccccctgcctcatggggccaatccaggagcagctcctgccacctgggccagtgagcctgagaccctacacggagagactgtgcttggaggggccctgggctggctccctggactccttgctccttcctctgagaagggagatgctgagtcccccatttcaccccaccctggctggtccttggcatggggtggccactgggcacgtggccctcacccttcccttcctccccgctgtgttcaggactggcggtcggcctggacccccagggctacgggaaccccgacttctgctggctgtcgcttcaagacaccctgatttggagctttgcggggcccatcggagctgttataatcgtgagtgtggggccttcacgggagtccgggtgccccaaacatgcatgagctggaagggctgttctgggttggctggggccaccaactcctctgagcagccgacggggggcaggaagggccaccttgtaacagtcagcaaagccgccagggccctcccggacctcaccctctgatcgtggattcaggtctcgcgtcgtgtccgcatgagaccatctgcgtccagcacccaggagggtcccgcacaggcaggctgggtgtggtgggcgctgtggggcagtgggtggacaggtgtgcttcgccccacaggccagggttcgggtcctcctcacccagccacccctccctgacagggcgaagggcctcaggcgcttttggcagttggaggtctgcagtgacgagagagaagacattgatcggcttgttttgttttcagatcaacacagtcacttctgtcctatctgcaaaggtttcctgccaaagaaagcaccattattatgggaaaaaagggatcgtgtaagtggggctgaacctgaccggccagccatgtcggctgggccctgagaccccgacgtccagtctctgcggggtggggccccatgagagcgtgtaggcctcatggaggagggctgggggcagcctgggtgagccccagggctccagagaggtttgccacgttgcacctgcaggggctgggggaggttagctgaggggagggggctggaggaggttagctgaagggagggggctggcagccagtcctgggcctcagtccctcccgcctggcacagaagtattgggctgtctggaatccccagagtggagatgggtggggtgggggagatgaaactttctggtgggtggtgagggtgttgctgaggccactggaggggaggagacccccccaccccactgtcagagggtgcagtggaacaggggcccagcacagagggaacctccagtgttctagggaggagaggggaccttcgaggccccaaaggagcaggtggcaccgcgggaggactcagcacagcgtccaggagccacgacagggtcaggaggggttgacgggggcatctgtcagacaacaaggccagcccctggtgacctggtagctgagatgggactgagccagggatgggcgaagggataatgcttgcgcaggggctgggtgtcaggaggagtgtgaggctcccggcccgggaggagagagccgagtctgaaggggggtagggcagagagggagaggcagtgagtggcctggaaggccggatatgggggtgcacggggggtctggggccttgtcagttcctcgtcttcagtgccatccacgacctgtggaccttgcgggctctgtcacccggattcactccatcccctctgaaccctgggaggggatgcgcctttgtcttccccttgtacacatggggagactgaggcagagctcaggaagctgattgcagggtcacagctcaagggcaggtcctgggctcttcctcttgcctctccacagggtatctcacgggagctagtgcagccatgggcatggctcaggccccttggcctggtgtagtcctcacagctcctgttttctcatttgcttcctaatgtattccaccaccacccccactaacacgagctctgtctggttcccggatgagtccgtacctggctacgaggggaggaagggagcaaggtggatgatggctgggtggacaggtggacggacagatagatgggcggacgggcaggcaggtggacaggtggacgtgcagagagggagggaggaagggagcaggtggtggcgatgggcacaggcctgatcctgccctcccgcagctccctgctgaggaccgcattcctcctgctgctgctcatcagcgccacctggctgctggggctgctggctgtgaaccgcgatgcactgagctttcactacctcttcgccatcttcagcggcttacaggtaggtgacggccgagttgcccgcgggacccctgcctggccgccgtgacaccatcgctgtgatgcgaagcagtggaggcctctgcggtcccaaaccagccctgcctgggtcccgcgtgggggcctcctgtggctgtgaggactcagtcccttgtgcagccggcacgggggctggtgcctcctccccactgtgtctggggacgatgaccctagtgccaggccagcacaagtccacttgtgtctccagggaacagaagtggccatttctagtcataccaagggccacacagcaagtggacttacgacacagtggggaccccagaggggccccaaggactgtggaaggagtgcccagaagactggcctgagccggggccctcactgcctccagcacaccgggggtctggcccaggcatctcagtttctgagctcccccacctggcctccagatagcagcagtccctgaggaggggaggcctggccgtgtcctgggccgtgtggccggacatgttgtgtgcactcaaggctgtatgcgcatctgtgctggggcgcctaagggcaggtgcctagggaggcagcagcaggtgctgaccccaccttcctccctccagggccccttcgtcctccttttccactgcgtgctcaaccaggaggtccggaagcacctgaagggcgtgctcggcgggaggaagctgcacctggaggactccgccaccaccagggccaccctgctgacggtaggaggcgccggggacaccgcgggactgggggctgggcggcatctcgaggggcgggggagggtgatcgagcctcagccccagtcctgcggcccgtatgcccctcacggtggggatggcagagccgcccgcggtgcacggtgtggctgccgcgtcagaaccagaaagtgacagaatcggccagatggggcctgggtcgcatcctaaccctgctcttccaggccttagaaagagagggtcaggaccaccgaggatcctgaccagaagcagtggccgtagggagggcggcagcccctgaccacagcgcgggccaggatgtgcttccctcagctgccaggaggctctcgtttgcagtgagggttgactgcttggggccagctcctcctgtgtgccaggcaggggcccagccagggtgtgggtgtggggggcttgccgtggggacagagtcattccccgtggtggtcatgtggtggccaccacttggcagtgaccagcccctcccctcccttcagcgctccctcaactgcaacaccaccttcggtgacgggcctgacatgctgcgcacagacttgggcgagtccaccgcctcgctggacagcatcgtcaggtcaggccgcagctccgggttcggggaggtggctctcgaactccctcaggttttgcccctgccaccccaacctgtgtcctgccattcaaccaacatcaccttccacccccaactttccacccgcaccttcttcccacccgcaacttccctccctgccccgcaccttccctccccgcctcgcaccttcccttcccctgcaccttcccccaacaacctttcccccaccaacttcccccaaccaaccttttcccgtgcaaccttcccccccgcaccttccccgcactgcaccttccccccgcagccttcccccctccaccttccccctccacctttcccctgacaacctttccccccaacctttcccccagcaccttccccccaacctttccccccaccaccttcccccccagcctttccccccaccacctttcccccacccagcctttccccccaccaccttcccccacccaacctttccccccaccaccttcccccacccaacctttccacccaccaccttccccccacccaacctttccccccaccacctttcccccacatactcgggaggctgttttgtctgtgctgttgttgggaacacagaaggggtaggggcagagaatcttccagagaactttccagcacctcctgttccctgacggatgatactgagcccaccctccctggcctctctagggatgaagggatccagaagctcggcgtgtcctctgggctggtgaggggcagccacggagagccagacgcgtccctcatgcccaggagctgcaaggatccccctggtatggcttccctggagggggaggaccccgtgggttgtttttcccacgtcccttcggtcactggacagactgcccctgaagaagcactagcagcctcgccatgctcagcgtcagcatgccaggggcccagtggctctgcttggccctcggtgggactccctcacctcccagggcctgagcctccctgtcccccgcgcatccacaggccacgattccgactcagatagcgagctgtccctggatgagcagagcagctcttacgcctcctcacactcgtcagacagcgaggacgatggggtgggagctgaggaaaaatgggacccggccaggggcgccgtccacagcacccccaaaggtgagtgtgtggggcacattgggccaggctgggctgtggacagcgggctcggggcaggccttggctatggctgggtcccttcctcccaggatatgcccagcagcactgcagccacatgaaaggacagcctggggtggggggactctggttgggctcccccacagcctctggagggctcctccaggccaaccccctgagcggaggcaggaactctcaggggggtctctgtggactgtcaccgcaaggtccaggtgaggctgccagtgggggattagcctgtatagttactggtacagatgcggcgggggctcccaacaagggccctgctgccaggactcgccctcctgggcctcagtttccccacctttagggttcagccctaccaggcctgcaggttggggagaggtgggtcagagccaccagacccatggctctcaagggagcagctcgagtggcagtgccgctgcctgctgagcaccgctctcgtgcctcaggggacgctgtggccaaccacgttccggccggctggcccgaccagagcctggctgagagtgacagtgaggaccccagcggcaagccccgcctgaaggtggagaccaaggtcagcgtggagctgcaccgcgaggagcagggcagtcaccgtggagagtaccccccggaccaggagagcgggggcgcagccaggcttgctagcagccagcccccagagcagaggaaaggtgcctggggaggccggggctgcagtgaaaggctggaggacccagaagggccagtccctggtctggaggtgggagtggggctggggctggtggggcaagtcagggcctgggcagaacagacgtggcctcctggcctagccctgggacccggggaaccaggaggaaggacaggggctgaggctggctcagctgcacacggcccagcagctgcccccggcagcatcacccggacttgaccttgccgtgtctcctcctcccaggcatcttgaaaaataaagtcacctacccgccgccgctgacgctgacggagcagacgctgaagggccggctccgggagaagctggccgactgtgagcagagccccacatcctcgcgcacgtcttccctgggctctggcggccccgactgcgccatcacagtcaagagccctgggagggagccggggcgtgaccacctcaacggggtggccatgaatgtgcgcactgggagcgcccaggccgatggctccgactctgagtgagtagcctgggcctccagggcggggatcacccacttcccccttgtcctgagtcaggagagagagggggcagtggtcagggacctgacacccacctcacctggagccctgagtgcagaggaagcccaggcggggatgggggaggggggaggcgctgcagctgaggtcaggaggataccccggagatgggcagaccccctatcctggggacacgtctcaggcctctgggactctgaagccctggccagccccaaaatgctaggacctaaggtgctgggctctgcgtttgatcagcattgtctccgcctgggaccactgccacccaccttgcagttgaggatactgagggtcccggaatgccaggggtgaagggggcggggtggagctggggtcctggccccagacctctccctgtcgcccctccctccctccaaactcacaagggagaagccaggtcttcagaatgccccttccaaaagtcactgtagagatggccggtttctaacgtggattccttgcgctcttctgaaagaccagcaacacagaggcccacaggctggtcctggtcccctctcctgcctcccaagggcagcctcatccaacatgagcttgccctccctggagcccccagacgccccctctaccctgatggggtgatcctgcccccccgtgtgacaaccttgggccccaccaagccgctaccctcactgacccttcacctgcttgctggcttcttcccacgcgcagaggcagtaatgaaacttcaatttgaaccatcagtaatgaaacttcaatttgaaccatcaggaaaccgtgaggcaagcccgtcaccccacacaggctgcggcatcaccctcagaccttggagcccaaggggccactgcccttgaagtggagtgggcccagagtgtggcggtccccatggtggcagccccccgactgatcatccagacacaaaggtcttggttctcccaggagctcagggcctgtcagacctggtgacaagtgccaaaggccacaggcatgagggaggcgtggaccactgggccagcaccgctgagtcctaagactgcagtcaaagccagaactgagaggggaccccagactgggcccagaggctggccagagttcaggaacgccgggcacagaccaaagaccgcggtccagccccgcccaggcgggcatctcatggcagtgcggacccgtggctggcagcccgggcagtcctttgcaaaggcaccccttgtcttaaaatcacttcgctatgtgggaaaggtggagatacttttatatatttgtatgggactctgaggaggtgcaacctgtatatatattgcattcgtgctgactttgttatcccgagagatccatgcaatgatctcttgctgtcttctctgtcaagattgcacagttgtacttgaatctggcatgtgttgacgaaactggtgccccagcagatcaaaggtgggaaatacgtcagcagtggggctaaaaccaagcggctagaagccctacagctgccttcggccaggaagtgaggatggtgtgggccctccccgccggccccctgggtccccagtgttcgctgtgtgtgcgtttgtcctctgctgccatctgccccggctgtgtgaattcaagacagggcagtgcagcactaggcaggtgtgaggagccctgctgaggtcactgtggggcacggttgccacacggctgtcatttttcacctggtcattctgtgaccaccaccccctcccctcaccgcctcccaggtggcccgggagctgcaggtggggatggctttgtcctttgctcctgctccccgtgggacctgggaccttaaagcgttgcaggttcctgatttggacagaggtgtggggccttccaggccgttacatacctcctgccaattctctaactctctgagactgcgaggatctccaggcagggttctcccctctggagtctgaccaattacttcattttgcttcaaatggccaattgtgcagagggacaaagccacagccacactcttcaacggttaccaaactgtttttggaaattcacaccaaggtcgggcccactgcaggcagctggcacagcgtggcccgaggggctgtggaacgggtcccggaactgtcagacatgtttgattttagcgtttcctttgttcttcaaatcaggtgcccaaataagtgatcagcacagctgcttccaaataggagaaaccataaaataggatgaaaatcaagtaaaatgcaaagatgtccacactgttttaaacttgaccctgatgaaaatgtgagcactgttagcagatgcctatgggagaggaaaagcgtatctgaaaatggtccaggacaggaggatgaaatgagatcccagagtcctcacacctgaatgaattatacatgtgccttaccaggtgagtggtctttcgaagataaaaaactctagtccctttaaacgtttgcccctggcgtttcctaagtacgaaaaggtttttaagtcttcgaacagtctcctttcatgactttaacaggattctgccccctgaggtgtaatttttttgttctatttttttccacgtactccacagccaacatcacgaggtgtaatttttaatttgatcagaactgttaccaaaaaacaactgtcagttttattgagatgggaaaaatgtaaacctatttttattacttaagactttatgggagagattagacactggaggtttttaacagaacgtgtatttattaatgttcaaaacactggaattacaaatgagaagagtctacaataaattaagatttttgaatttgtacttctgcggtgctggtttttctccacaaacacccccgcccctccccatgcccagggtggccgtggaagggacggtttacggacgtgcagctgagctgtccgtgtcccatgctccctcagccagtggaacgtgccggaactttttgtccattccctagtaggcctgccacagcctagatgggcagtttttgtctttcaccaaatttgaggactttttttttttgccattatttcttcagttttcttttcttgcactgatctttctcctctccttctgtgactccagtgactcagacgttagacctcttgatgttttcccactggtccctgaggctctgttcacctttcttcattcttttttctgtctgtccttcagatttggctatttctggtgctccgtcttcaagttcactgattttttttcctctgtcgtcttaattctgctactgaactcacccagtgaatttatttcaaatactgtaattaagttttaaaatttccattaggttcctttttatttctctgctgggtacttctggttttccactcattccaagagtgttcacctttacttcatgaagcatggttataactaggactgcagtgaattctgggataatttgaacgtttgagcatcttggggctgaaatcgtcttttctgtttgcattttcctggttgtgtgctgagtaactgcaagttgaatcctcactcgtcatgtggaatgttaggttagactctgggttgttaacaccctcgttgtaagtgtcatttcatgtgtttgtttcagcagcaggcaacctggtttaggttctgaccactggttctgtctctctttccacgagcagcaggtccaccaccaggtcagcccttggccttggctgtgctgttttgggtcgttgcctgcactcacaggtggggtgggcagggacgtgtgtcagcacatgtagagaatctgggggtctgcttctccagcactctccttgctggaatttgccttgcattttctcacttctggggtcccttttcttggtttctctgtccagaaagatgggtttctcccagagctctagccacctgcactgtctcacgcttccacccttaaggaaacagggctcacccttaaggaaaagtagtgacagcaaagagagaaaaatgggaaccccaaccctctctagtccacagtgcccccgtttcccaggcctctctggagttgttgccctggtgctggctgcacaggaccacagattagggccacccccgggtcaaatctgagagaggaaaaaccacccatgtgcctgaggtcatttttcaagttgttgctttctcctcagttcacctgctaacgtttacatcctagaatgctcagtggctaacatgatagaatatttctacctcaaccccaaagccatgattagcaggaaaatactagaagcatctgagagagagaaagcagtccaggtagcccggagcaggcctgtccatcagccaggccaggatgtccatgtgaggaccacgaagtgctccgcagagcatccgcagcagaccgtgacgggtgagggctgaacgagcccctctgtgatcctgcctgaacagatgacagcacaaacaccggccaagccacagggcgtcgactcccccggcccaggtgacaggggtgaccgcagctgcttcagtcacagcttcagcctcgccttgggctcctcagcctggaggcaaggcttgttaagacccccaggagggtcaggcagtggtccatgtctgtaatcccaacagtggctggctgaggcgggagttccagaccagactgggcaacacagcaggactccatctctacagtttttaaaacttagcacagtggatcatgcctgtagtcccagtgctttgggaggctgaggcaagatcgcttgaggccaggagctcaagaccagcctagacaacatagcaagactgtttctaaaacaaaattaaagttagctgggtgtggtggtgtatgcctgttgtcccagctacttgggaggtcaaggctgcagtgagctgtgatcacaccactgcgctccagcctgggtaacagagcaagaccctgtctcttgaaaagaaaaaaaaagaaacctccccaagaaggaaggggcttgggcccaggcaaggctccggcacagggcaacatgggagccagagactggggagaaggcaggctcagggtgtttgaaaccagctcagggcctcgggaaggagcctcccaggtgtgaggtgagggggcatcatcctaggacccatgtatcactgagattatccgggaacaacgtagggggagaggagagcgagggctttgctttcatttgtatcacaagcagggagtaggtgtaggtgtacaggcacccagctcttggcctggaaaatgttcccccatcgtcttcatggataggtgtggcaaggggctaaggccaggccactgggggtacccttgcaggcagaaggggctacctagctacctgtgctcctggaggcccccaggtcttcaagaagtcatctgaggggcacagcctctggagtgtgccagccttgggtgctggggagggtaggaaagaggccagaagagcagcctggagacttggtcccctggccaacagtttctgctgaatctctgagacatcgcaccaaagccctccagagttggccagtggccttgtagggggcagggcaggccattgtgcctgctagagaggggagccctgccagtcaggaagctgtcaccatggagcctgggggctcaagggggcagaggcaggtttgtgtccccgcttcctccactggccgatgcacaggccctgaggctggcaggacggtggagcccgctggaggttggagcgggggcagccttagcgctgctggcctggtgcccacaccaccttctgcctggctgccccacctcccacctactcatgtttctgtgacctgggagggttcacctagggcagagcagtaggcaccacaagggctctcccaccctcagttcccaggctggaggcccgaccacagccataaatcagggaacccctgagcccagggaggctccgtgctgggctgagctggcagaacaaacgcggcgctttagctcggcctccatgcccagctgggccgaggatccccaggggcctgtctggtcccactggccagcgctctgcctgcctggtagagctggggcttgcccctggccagggcagcactgaccccacaccccccacctccccaccccagcccagcaagggccacggctccaccttaggccccgtttcctcacctggcctgcggggttctggcccactcctcaccctcaggacactccctgctgcgtgggggcctaggctagaaggaagggtgccccaggtcaggggacacccagtggggagatgggaggaggggtcaggatggacagtgggccccatggcagcccccaccctgacgcaccagcaagaactcagggcatctgggcaaggccctctgcgcaccacctggctgcctctggaaccttcccacccagagaaggggaatgcacctctggtccccgcaggaacctgtcttgaggcaccaacaacacgctacgaaggactcaagcccagcaagaggaagagagccaaggacacaggtcagcatcgcaggcacctactctggagtccaggagcagggatacgggggcagaggatggagcagctgggacctcagggagaggtacgcaggttgccatggctgcgtctgcagtccacctgcctttccacgccagggagtcagtgatgtggagccccctgggccccagtggaagcagcgatcagactatgtgtccttgaaataatgtttattccacgctgtcccgacagccccctctgcaggtcccctcggtgtactctgaggtgggaaaccctccctgggggcggtgaaggggaactcgggccaccccaccagccagcagatgctccagcagccagagccccagcctggagctgaggctcttcctggggctcgccgggcccctgcaggcttttcggaccctcagccagcccggcttcctctgctttgggcagcagcaagctggcccttgggcacctggactgctcaccagccgcccagccatgggtcctgctctccaggttccttctagcagatccatctctgtcagagcaagggactcaggcctggaccatcttctgggctgtcactggggctctcagtggccatcccagctctgcgctggcccttctggagcgtgtaggcagacggccccagccgcaggatcttcccgctgcccaggcactcgtcccccttgtagaacacagcaaactgtaggggagagaccctggcatcaggggtgccacagggagccagccgagggcaggcaggggcagagtgctcccctatggggcctggcctgtgctcggagcaccaggcactgagctcccaggggagcagggttttgctgctgctgctgctgctgaacaggagaggagaggcctggggcacccagtggcttcactagggagggtcttcagggtacctctccctgagtgggacagtcacaggggcctctcctgggactccaagggactggcaggtctctgcaccccttgggaatgtggagctgtgacaggaaggagcatggtggcagccagaggatgcttccgcttccctcaccccaggttccctcccaccacctgcccctggagattcctcaggcctacacccaccaggcgcccaccctgggagctcctgcacactcggcccacaggggccccgaccctctgcctctttgagcactgtcctcatgccccttccattttctgtcctcgcttctggggcccgggcagcagctgagcctctcagggcccgagcaggaactggctggttggtgacaccagagtggaaatcctctcacagttgtcactgtgggaggagcccccagggcagggctggtggcactctgccctcaccagctgtgtgacccgagcacaccctactcctgggcctcagccccttcctctgtaacccgggtgccctggcagggtgcagagcagtacagtcctccccgggctcacccccacaccccacgcacctgtcctgtggcaagggcacgcacagcctgcacagctgtcacccacacggtgccatcttgattgagggtcagcacacagggcactgggtagaagagaggggcccttggagggggcacaggcctttcctggtcgacctcaggcccccagggagaaaggagcaccagcccacggggtcaaaaacccctgcttagaggggaagggcagggcaccagcctgggccctggacgcagcaggacactgcggggcagtgtacacacttgcttcagcccaacacgccggggcctgcctgcatctgctcccagcacccccaggcctcgctcagggcaggcacaggacacgggagttctaaatactttaggtaatctccaaatgatctccacaacgggactttcctaccccagggtctcccatccctggcccaaatctggcctcaggaagctcagcttcaaggggcccgtcctcaggagccctcccgtcagtcacctagtgccatctggtggcggaatcggaagtggcactccatcatcttgtcccggaccagtgctgcgggaggctcctccgcaatccagtgcacgcggctggtcctcagcaggtccctgtacagggctgggtggtctgtccggggggcctgcagaatggaatgtgaaggtggggacgccgaggggcacctggccccaaggccggcctcagtgtggtccctgggaacaactgtcctaccagcacacacacacacaggtaacggtgctggcaccgctcgaagtgttctacccacagaaattcatctcatcacccgccgggcctttgaatccccattttacagatgaggagactaaggcccaggaaggaagtaccatgtcagagtgggcaagaggcaggggtgagatccgagcccatgacagtgaatgctgcaggttcaagtctgactcaggccctctacctgcaaccacctgtggggcagcagcacggcccccctcgaggactggtttttctattcgcagggacaggggccagccacaccacgggctcttctctcaaggccaccccaggaattcctccacacaccaaatggctgaggagaaaggagggactggtagctgctggcttcccacaggtgccccaggactggccctggtctggggggccccagataccctaggttggttctgaggcccctgctccctgtcacccacccatggcctcgggccattgagacctggcacctcctgggattgtgccaagccccgcccctgaagcaggacgaggagcatgaagttaagggctttgggttctaagcaggcaccaagacccgtccagggacaggaggccgttggttaacccttctggtcttctcacagcaaactgaaatctagatcatttaattcattcgcagccaggcttttctccccacaggtcttcctagtaaggagatgtcctggaatcggtgggtggggcctgctggcccccgcctccgtctaagagaaggcgccccagcattcgtgccagaacatgagccggcagccagggtgctgagagtgggccttctcagctccacgcgccaaggtggaggccgggtcactcagggaagaggctgtgctgaacacggcaagcagcatccccggcctgacccacagatgcagcagcacccgcgtccttgcttttccacccaagctgtgacaaccaaaaatgcctctagacactggcaaggtcccctgaaggtggggtgagcttgccgccactgagcggccctgctttgaggccagggtcacagtggtaaggtccccactgtggtggaaggcttggtttgatcctggcttggccatctgcacctgcctgacaacaactcactggatcctaccatggtgggcaccatccttggcactgaggccatgccctctccaccggatgagccacccaagctctgggcgtcgctgtcctctttcataaaattggagaaactgtatctgtgtatcggggttcagggatgattaagagaccagcatacaactcagcctaatgaataccttaaaactctcctgccaccatggccagtcccaggaaaggcaggggaccaaggacaggaacagagttagtcacagcctccaggaagccacggctgctggaggccttctcaagccctggtctggaagcactgctggccctgccagaaccagccccagtgctgtctcagaggccggcccactcaccacaaacacgtcacccttgacgctgtccttctccaccacgtaccagggctctctcaggccacctatgtttgctctctggcccaaggtatacaggaaccaacctacagaaagacagtttctccatgaggctgggcaacaagttacagcccacatgtcacgcctcatcatgaaggcagatgctgggagggcagcccagagcaggcccagcaatggtgtaactcactaggaagatacgattctccaaccaccaaagccagccctgaccaagcacctgagcacatctcatcattgtccaggcctgggctggacatggggtgtggtggccacaaagaaggcaccttgtgccccagaaggtgcaggttccagctgtaggagcccctgaccctaggcccaggatgcggctgggtgccctgtgtgacgccaggggcccttcttgctgagcccatgacatagctgcacgtcttcacagtgtccatctaatgcagtaactgcatcagggctacccccagctgctctgcgcaccctcacaatgtcacacagcagatggcaaactcactgcctccctcccctgcagtggggcacacaggcagagagaacctcatgggatttaccacgtggcctgggccggcagccttcttcagtgaagtgaactgcaggtggaagccatgagtcatccaactggctcctgctggggccagggctggcagatacatgggcaatcctgtctggcagttctgtcccaagcaaagctgtcacctccacctgtctcaggaatgcctagccccggctccgcctgccgtctcccctccacaagaggtggaagatctccaagtgcaattcactgcaagacgccctacacctgagctgcagcctggctctcctggccagtcccacagctcaggtctgtgctgtgtcaagacctgcctgatcatcacgccggcaggcacatccccgccactgtactaacccaacaatggctgcactctgtccccacagcaggactgcacactgtgactgactcggagcctgtcccctgacaccaggcacagcacaggctcacgcaggcctcaccgcagtaagggtctgcacatgagcgagcagcactctggccagcgcggacgcctgatcccatcgctgcatgtggtccttaatcattcacaccatgccgggacgtccaccttactccctgaatcagagtggagttttgtgtagtttaacattttccttacacaggaaggaaatcattctttttacagggacttgatacgtaactcacagagtatagtccttccaagtcagaggcgcgcttttcatgaactccagcatctcagctgaggccacatctggaagtgcacccagccaccatcaaggcaactgttccaccctaggccgtgcccgcccccggccgccccacagagccttctacaattctccagccaagtggaagggacgacaggaactctggtctagtctcccagagctgaaacgccacagctctaggcatttcagatgacaagtggcagagtctgcacctcacctttatgtgttcccagaaccttattgtcttctatggaaataaagtgaccaggtcgaggctgcagatactggaaaacaaacatgtcattaccgacggagatctaggcccagggcagacacgcagccccatctctttgtgtcaaagagcagcacgcacctgaagaaggaaatgttcaaaattcctcttcccgatgaaacacatgcccatgctctgaaatgagaagacggcagccgtgagaggagcagaagtggcggtggcccaagctgtacccagacgtcctgagcgggccctggggcctcccggcctcaccccacactttgcttccagggtaggggcccggctgcccaccggcaccctcggccgccagtcacagccggcgcacacgatgccagagccttagagaacgcctcattgtctcggcccgcggggtctgaccctgcgcgggagaccctcacaccagctgccccggggaagaaagcagaacccggtcaggtccttcaggccactgtcctgcgaggagtgggggagagacagggaccagagaaggggcaggtagcaggaaagccaggcctgaagctaaggccttaggggagggctccaggggagtcagaggagagaggcgccttcctcaagcacatctgccctagctggggagcctgggtggcgtgcgctctccaccgtggccccatcaggggctgcatcgtttactctggtttgtgtctctcaagactgcccttccatccctgcggctcccaccacagagcgacaccggaaacggaaaacaagaggagaggaggacgggcggtgggcgtgctcttcagggaagatggctctgatgaaaggtatggccgtttccattaccaggaagagacacgaaggagcaacagctcccaccgcactggcccctgaagaggtgaggctcatcccacagcgccctcgccctccatccccaaggccctcccacgggcttcatcctagttccgccaacactccgggttctctctttttgagacgagtttcgctgtgttgcccaggctgtcctcaaactcctgggtgcgctcgatcctcctgaggagctggggccacaggcaggcacccccacagcggctccctggcttctcctcgcctcaaggcctttgcactgccgttccctcatctggactttcccagccctctctgggacaccggatcctctcctccttcaggtctcaggttccatgtgacttcttttgaggccgtttttggcatctccattccctactctcagaccccactggtgcttcccacccagggtcctacacctccctccgtagacattttctaggtttacactgattggcctcctgcctgtgtcccccactcgcgggcgggctccatggaggcgaagatggaactgtgtgcgcgtcaccaattcctcgcggcccagcagcacagcgcccgaacagatggcaccgaacgagtctgtgccgggcaagcgggtgacagggcacatgagtgtgcagacggcggcacagcacctgcccctccaggggtctcggggctgcatcacactgcctggcactcacctggcaggcaggccatcccaagagcaccccaccagctgctaaggctgtggggaaagctgcctaccacataggggcagaggagaggaaaaaagcaaggagtctcgtataggctgctcccgatgtcagcagagccctgtaccgtgcgcctcagcaaactcctccatctattgctccaaggcccgcctttgatgttaggtcctggagaaggggaagtggtgcgggacccacaggtccagctgctccgtgccatgcagtcgggaaagggaaacaggcactaatcaaaggcaactgctcactcgtacctctttcttctgaagcacatgatgaagtctattctcagcagcgattttctttacaaactctttcgttaatccccccagagggaagatggttctcctcagggcatcctgggaaacctggctgagaaagaaggtctggtctttaaagctgtcagctgcctggaggagttttaccgctgccaagaataaagaacaaaagacgatgcaggaataaaaataatgatacttcactttcaacaatgtccttctgttcacttagacagactacccctagcctgtcagaggcagacatcaacactcaatagcaactactagggaaaagaccaccacgggttaatgtaagaaaaattcgcacctccaaaaaaaaaaacaaggattttacatgacaaagaaattattccagctcatacttcagattataatattttcaaagatgaaacatcacatgaaaaaatgttctcaagtgataagaaaaaaaaaaaaaaacacctaaaataaattcagccaaatcttggaaaatggagtaagctagttgctggcagaaaattccactgatatagtgtcagctgtgccttcttccaacaaccacaggatgtgttcgtgccacagtggtttcaaggactctacactttccaggttcactgcccggcggccagcacatgcctccagcagcgccctacctgtgaaggcattagctttcttggtaaaaacgtttttttgttgagagtctcagctgacatctgttaggtgaccctgcagttcctccgacattccctatgtgattgtaaagaaccatttctggctttaaggcaacggagcagaggtgtgagtaaacctggcttagaaccgtccagttctccactctcgagttcaatgatcaatggcaaaaaactaagacgaacgtcagttttctggcttctttcaatctttctcataaacttctcctttcgagttacactcagagcacgccacatgccgtgacggtcagacagcacacctacccttcctggcttggcagagccacgtgtacagtacacactctgcgtagctagtgttttccatctgccgattcccacgttagccgtgagagggagaattctccccacgttacagaggggagactggagccggcccagttcatcacatatgactcgcccaaagtgatgcaggtggaggcggtggggctggaggctgcccagcctcccgagtccccctcccttacttggcaggtacaaacagcagaactgagtgacaagtgagaccaagttcagccgaccagtcgccacggaagcagagcactttccagagtccacttttttttttttttttgagatggagtctcgctctgtcgcccaggctggagtgcagtggcacatctcggctcacggcaatctccgcctcctgggttcaagtgattctcctgtctcagcctccagagtacctgggactacaggcatgtgccaccatactcggctaacttttttttttgtatttgtagtagagatggggtttcaccatgttggccaggctggtctggaactcctgacctcatgatccgcctgccttggcttcccaaagtgctgtgattacaggcatgagccaccgcacctggcctcagagtccactttcaatcccaaactaactgcagtcaaacactgcatgtgtgtaaaagcctcagaaaactaggagccatttgcattttctcctagttctgcgtcattttaaaacaaactaaaaatctatgattttcaaaaaagcaagctggcgaccctaactgaactgctatagaggaaaaagcacagaaaggaatgaacaacatttggaggaggctgcctgtgctggagcctcactgacacgccggctgccgtgctggctctgccaggccggtggtagcacgctgtgtgggggaaaatcagcccagtcacaggccaggcctaggagcgctggtctcaggtgctgaccgaccctgagcccaggccgtccactgcccctgcaggtgctctacccagagacccaggctgggccagggcaactgaagaagaatgaaatggaaaccttagtgtgcctacaaaacccagtgaaggccaagacactgtgcaccatcacaattcccacatgccaaacgcactcaacagaacgcatcagtactgtcccaagtttccgagggcacgtggcctataataaaggtcgatggctctgcagggcacacagtgttctaggaggtaatgttctaggaggtaagcaggcgcatctattcaacatggaaattaaccctccatctcctcaggccccgtaaatgcacaattacttggtgaattccaccctggagttcccaagtggcaggactctgcattccaacccatgtcttcctgaaatggggggctgtcttatctgcattcaaacccatgtcttcctgaaatggggggctgtcttacgggagtgggctgctcttctctgggctcaagtcagtacagttacctgatcaccctgtggcataaggaaggaaggcgaggagggaacagagggcggcagacgactgttggcacactcagggctcccttgaccaagcacggccctgccccatcactgcagccttcaggatgggctcagcaacgctgaggaaagaactcagctggggcctgacccagcagaagcagcaggggctggggagtgagcggaagtgcactgaaatccagctctgccacccgagggacccaggtcagatggcttcatccgggcctcggtttcctcatctgtgaaacgggatgagagcatacacctcatggactgctaagaggagtgatgtgaaacgtgtgaggccgggcttggtggctcacacctgtaatcccaacactttgagaggccgaggtgggaggatcgcttgagcccaggaattcaagaccagcacggacaacattaacgagacctcatctctacaaaaaatgaaaaagccgagcatagtggcgcacacctgtggtcccagctacttggtggggctgaggtgggaggatcacttgagcccaggaggtggaggctgcagcgagccaagatcgggccactgtactccagcccggttgacagagtgagatcctctctcaaaaaaataaaattaataataataattaaaaaagaaatgtgtgtatgtaaagccctgccccagccccagagacccctattccccagatggcgggacaaggctccctccaacatctgaacttccggacaaaagagcaaggctgcccttcaggggtccccactgatggacggacgctccgtgcggaaacacggctctgagccccacttggtttttcactcaacaatacagggaattcctcttttctacacacgaatgtacaccaggacaggccagcagcttcccagctcactgtctgccattgacttttttctagaaaggtgaaacttggctccctaacacgcataaactaacgtgtaaatacggctacaaagcctgactgctgagcccatgcgatccacagcaggtcctgtgctcacagcacgttgaaagtctgcctgaaccgcacgcccttgagaacttgttgctaagtacaggtccttggctagactgacagcaccccaattatcactgtcaaatatttacccagatatttttggaacattcaaatcaccacacagtgtcgagagctggattatcagtatctgatgtcactttccaccagccctcaccatggccggcagggacactgtttactacccaatcacaggccctccgggaaaatgtcctcttggtaactgcaccttttcaaatgtgaatcccatacaagctactctggagcacagagggaggggtggcagtgatcctcaggcacaacccactgtcattcctccaaagatttcaatctgttcacaagaatttggctctgacctgggcacatgaacttaccatttctaacttcaaaccgatttctgaaaagcccttcgggcttcttaacgtgcttctgctcaaagacttcttcatcttccagggaagttcttgcatagtgacctgtggcaatggcatctgcccctgtgaggtttttagaacacaaggatcaggttttagactcatacttgcaggccttgatcagcataaaccaaggcacaaaagaagagtatagaccccaagtcttaggctgaggggctgcacaatccaccctgcacccaaacatagagatcccagggaacagacgcacacatccaatttcatcaaacaagcagccttgaactcttaagctgatacaaccttgctacttaaagtgttattgcacctttaagagcctttccaaagttaatttctggcttaaggaaacagtctgaaaggcacagaaagatttaaacacaaaatattcctttcagggtttgtgataatacgaagggaggccaggcgcggtggctcatgcctgtaatcctagcactctgggaggccgaggcgggcagatgattgcttgtgctcaggagttcaagaccagcctgggcaacatggtgaaatcccacctttacaaaaaatacaaaaattagccaggcgtggtggggcacacctgtagtcccagccacttgggaggctgaggtgggaggattgcttcaacctgggaggttgaggctgcaggaagccaagactgcaccacagcactctagtctgggcaacagagcaagatgctgtctcaggaggaaaaaaaaaaaaaaaagaaccaaaatgttcaacactgggagaatgtgaagtgaatgacaatgcactgccgtaacaatgggggtccttacagagaatgtttactaacacgggaaaatgcccggcactgttcagcagggcgaggatgtaacaccatgattccacggtttttactgtacagaaacagttgaagaaaaatctcaggtctattcctttgattctgagagtgaaattataggtgtcgtttctcctcttttaaattttctgtaataaatatgtattattttcatcagagtgaagaatcatccagcacactgtttcttcttttcatattacacaaagccaaagagcctaacaaggtgcatatgaatccagaaccttttcattgtgtaaaaattccagatatttgggccaggcgcagcggctcacgcctgtcatcccagcacttttaggaggccgatgtgggtggatcacttgaggtcaggagtttgagaccagcctggccaacatgatgaaaccccgtctctacaaaaaaagtacaaaaattagctagacatgttggtgggcacctgtaatcccagctacttgggaggctgaggcaggagaattgcttgaactcaggaggtggaggttgcagtgagccgagatcacaccactgcactccagcctgggagacagagtgagactccatctcaaaaaaagaaaaaattacagatatttagtattgcaagagacttttatgaaaggtgcagcaaaatggattccatcctggaccaaccacactagctcagtgtaaacagaagacacagccatcctggaccagccacactagctccatgtaaacagaagacacagcaagaattagctgctgcatattaacgacctgaaaaaggcactttagagacacataatctcatcttgactgaggttctcctagagaaaacaatccactttacatctgtgtcctcaaagaacagcacttatactagaaaaagcgcaggatgcctctgagaagcgcggtgagttcagaagtctgggcgtcatgtcctctcatcctgtgctgcacggttcatgcctttcttccaggtgtggaaacattcactgcagaagttccttccacagcgtgcctgacagccagccacctaggggctccctaaaaagctttcgtgacagcttaatgctctccaaaggcaagccttcccttcctgaacagctgcctgcgcctccacctcagggaactctttctcctgccagtcctaactgtctgctggtgtcacacaaagaatgtcatcctaactcacacgcttgaccactgccactacgacccaaagtaatttcaacagttcagggaggacatatttccagataccctgaaaataaaaatcaattcacattctatcagtctatcactcttttcctgaataactaatacggtctaaccaggacggaccacaggggacgcatcaccccttcctagacattctatgatcatcaaggtgagctccgtctgtgctggctctgacaaaagacatcacactactggctcagtcagcctgggggcacctaaatcccccagattttctgcaaccaatggcagaagattcaatggcaaccaagctaggtctttccaatcttgtcctaggagaattactgaacctagttagcaaactttgcatttatctctattaagtttcatgtttttggtgttagcccaatgttgaaatttaagatttttctttttgattttttgtttttgtaggcatttgtttattcctaactccacaaactaactttcatcattatcatcaactcagctttaggttgctgacatattgaatctgcaagcctaatctacatcattgctgaaagtgccgacactactgggcccctggcttacaatggtatctcgtagcaacacacaacagggtgagctgcagtgggacagagcaaaccaagaagcctgagccagaacttcagaaactcattatggtgaccccaatggcaggggacaggaagaagaacctaaaattcataaagcatagccacagacatcaagaggtggtctaagcaagcaattcagtatcaggaggttccacaagaagaaacaggctaggcacaggggctcacgcttgtaatctcagcactttggaaggccgaggcaggaggactgcttaaggccagaaatctgagaccagcctggacaatacagttgtgacaccatctccacaaaaaattagccaccatggtggcatgcctgtggtccaagctactcaggagcctggggtgggagaatctcttgagcccaggaggtcgaggctgcagtgagtcatgatcgcaccactgcaatccagcctgggtgacagagcgagaccctgtctttaaaaaaaaaaatgttttaaacccaaattacttaccaagattatccacagcataatgaaaaaagcaactaaatttgatgtgcttgttgcaaactatgtcaggattgggagtccttcctttttcatactcattcaaaaagtcactagaataaaagaaaatgacttcagttccaagtgtgaaacattcctcaaaaaaaaaaaaaaagttcactaaattgcttgtttaatgtaatttccccttgtcataccaaaactataattttctgcaaaacaggagaacgtcagtcatcgaacatttgtttataacctgctgcatgggccacccgacaaggtgttattctctgccactacggctcaggagccaccgtctctgtgtaggctcacagggcttatggggtcaggagtggggagtggccgtgagggtctcactaaaaccctgcctctgggactcctccaacacagcagggcttaggtgaggaagagaagatgcctgagtgacagtggaaatgaaatcctttagacttcccttgcagattctcccacctcagccttccgaatagctgtgattacaggtgcgcagcaccatgcccagataatttttgtatttttagtagagacggggtttcaccatgttggccaggctggtctccaactcctggcctcaagtgatctgcccgcctcagcctcccaaaatgctggaattagaggcgtgagccaccgcacctggcccactgcaaccttttctttttttatagagatgaggtcttgccatgttgcccatgctgatactgaactccaggcctcaagcaagtctcctgcctcagcctcctaaagtgctaggattacaagcgtctacctttctgactgtgggtcttaagaccctccccagacacagtcccactgtatatcctgggggaaggaatggcgatgtcatgaagcctccataaaaacccaggagtactgggttcagagagcttctgcacagctacacttgtggaggctcctggagggtggtccccagggagggtgtggacactccatgaccctttccccatacctcacccaacccgtctcttcatctgtatcctttgcaacatcctttataataaactggtaaatgtgtttttctgagttctgtgaaccactccagcaaattattaataattgaacccaaagaggaagttatgggaatcccaactggaagccagttggtcataagttctagaggcccatactttcgactgctgttgtggggggagtccgtctgggggactgaacccccaacctttgggatccagcactatctccaagtagatggtatcggaactgaatcagaggacacccagtcggtgtccactgcttgctgtatggggaaaaccccccacacctttgtcacagaagccttcttccgtgaggatgactgccgtgatgagaacagaggagaaacacagtcagaggcttccctacacaagggctccatgagccattctgcaatctcagcctggaatgctgcgtcactgggcaaatataccaaaaatactatcctcaggtgacaaacacacacttctgagaactagcaaactcttgggtgcttaaagtggatcaggctatcctaattcagtgaacttctgctctaacagactgactgaacatgggaaaaagatgccatgataccagcaaaacttaccaagaatttcatagtcttcgaggattcacttcaagagggttatgatgcctattttgggagtttaaaaatgggtgtatttttggtataagtgatttttttcatttaacctaaaactctctattaatcaacaagggttaaaaaaaaaaccagtgctgatcaagaggtttgtgttttgcagacatatcacagatctgcacagggtcagaggttccttggatatcttccactttagcaggcaccaaactgttttcctacttctcagtccccctagaagttcataaaaactcatgtttttccacatttgcaacaacacttgatattattacactctttccattttgctttaattattagaaagttaccaggaagctcattaaactataaactacttaaggtgcaatctgtgtctgtgtcctagacccaacaaactttctatatcacagtcatcaataaatgttgaagaggctgaacattaaaatcagtttctgaaaagacacactgttaaccctttcgtaaacagcagatgggaaggcgtgtgttttggcattagcaaaaacaatggagtagcccagcctcttctctaactggaaagaagagaagcctttcatgtgcctcgggagggagacagatttaaaagactcagcagctaaaacgtatctggactctgatccttgaaggccagtgggtcttgaatgaaagaatgcaaaagaaatctctgagctagagagccctactagagaagtgagtcttcagcggaaagaccaatgcctccacgggcagctggtactgggcgagggcagagggcaggctggctggagccaggggcgacctcgggggcagccccagagatgggaaaagactctacccggccgcctccttctctcagtccctatcaagcagcgccagaaggcggcagcaagcactggcctggaaagctgggttttaatcccagctccgctcctaattctggggtttaatcccagctccgctcctaattctggggtttaatcccagctccgctcctaattctggggtttaatcccagctccgctcctaattctggggtttaatcccagctccgctcctaattctggggtttaatcccagctccgctcctaattctggggtttaatcccagctccgctcctaattctgggttttaatcccagctccgctcctaattctggggtttaatcccagctccgctcctaatttgccatactattcaagtcactcttcctatctggcctcagctgagctaaacttcaaaaatcgcatccactcgtacgttctgaaaaagctgtgctggcaggtgaagtgtaagctcacttggattccctgttgtcccctcaaactctacagtactcatgaggaatcccctaaaccagctttccccagccacccagccttgatcttgaaactactgctgactcctctcctctctggtctcccacacacatcagtccctaagccgcatcacaccttttctcaaagaaagaccctgacaaccccccacaccaccagcacagctgaagtgcttattaaagcagattccagggccgcccccagacctcggtccaggtctgtgtttaacaagcacctcagatctactgcccggtggacttgtcctctgggtccaacaagccagccctcaccttccactcccacactccctccccatgaagtccaaatctccagcaacagcacttcctgagactctctgcctttggtcttcccccagatttatcctgtatttggccgccacactcttttttttttcttatgtccccgagaaaactgcagaagtttttaatgcatttatcatgcattctacagataagtttttaatgcatttatcatgcattctacaggtaactttccccaggaaaattcagccatcagttttgtccatgttgttaatatatacgacacccatatgttatagcatagagtcacagagggttcatattcaagctcttccgttgattatttaggtgaccatagtcaatttacttaatctctctaaatttcgttttattgttatttcaatggttttttgggcaacagctggtatttggtcacatggataagttcttcagtggtgacttctgagattttggtgtacccgtcacccaagcagtggacattgtacccgatgtgtagtcttttatccctcaccccagagtccattatatcatttttatgcctttgcgtcctcatagcttagctccccagactcatctttttaataatgaaaataaaaatagcaggctggcgtggtggctcacgcctgtaatcccagcactttgggaggctgagacgagtggatcttctgaggtcaggagtctgagactagcccggccaacatggcgaaaccctgtctctactaaaaatacaaaaattatccgggcgtggtggtgcatgcctataatcccagctacttgggaggctgaggcatgagaatcgcttgaacctgggaggcagatgttgcagtgagccaagattgcgccactgcactccagcctgggcaacagagcgaggctctgtctcaaaaaaaaatagaaaagaaaaacagctatgtttattgactgcttactaatataccaggcatacatactagaacctaatctcaattctttcataaccctgtgaggcatcagtgttatcctcattttaaagatgagaaaattggggcttagaaaagtcaagtatctcttctgggtctttgttggcaggaaaaaaagagaatttttttcaattaaaaaaacaaagtcaagtaaattgcccaaggtcatataataagctacagtcaggactcaacccaaggctcttctgcccctaaagcccactcaggcaggggcagcctgtcccgcgcacatggcctgctgtgtcagacgccttcgacaactgcccgacattcatcacagtcagggctcaccagaggatgagccctacactccttccactgcaggaacaaaagtccagccaaactttacaacggtcctgaaatacacaatcagcatttcttctccccttcacgctgctctcgttaccccatttggagtcccttctctacaactttgtttgcaacccctcctctccggtgaagccttcttgattactccacactgcaagtttctccctcctctgggttcagtgactgatagcatcactggtacttcctgcgtgccacgcatcactgtcacctcttgtgaagataatgtcctcccaactagaccgcaaactcctacagagccaggtcacagtgaagacatcttaatgttcctagatgtggcacacgcctagcacacagcacttaattattgagattatattggattttagaaaagtttttgtttgtttcttgttttcagaggcacaggccatgtatcacctctttctcagaaatcccctaatcgctgacccacatagcacacaggcattggtgctcaccttccaggggagccctcagccttagctcccctatcctaactgggcaacagaaacagctcaaggtccaagaaagcattaaagagacttcaggcaagtggcaaaatgacaggagtgagagagctgggtgtgctgtggggtccaggcctcgcctctaacacagagccccgagggtggctgaggcctcttgcagtcttcagcaccaccgtggagggagagcgctgggctgcagcacaggcgtcggtctggctggttaccggatccttccactgcaaggatccacagtgtgaggaagcttcctttgtgctgtgacccgcactcacctgaacacatcattccaatactcctttacgtaggacacttgatggaaagggatgtctaagatctggcaaactctgtaagcatcttcacagtctttgtcggcagtacagaccccatgttcatccagtgagtcccagttcttcataaacacccctgtcacctggtaacctgcgggcgggaaggtcaattaaagagaatacataaatcaaccttcggtaaaacggcagtgatttctgagctctgagaagttccccacacgctgtgctcctgtgcctctgtgcctggcctgccgggcagtccctgctttgccatgtggcttcagggatccggtttccatcttggtgcctgagtccccaagattaacgaggtggtattttctcatctttgtgtccccatctatgtatcagcacaatacctagcaggaggggatcagccagtgtgtgtggaatacacgaaggaatagtcgaaactcaacaaaatttttcaaagcaccattcagttatcaaaaaaggaaactcttttcaaaagttatttctagttactatctaagacttagattctaagtgatcagatataaagataattaaaattttcgatattttgtaagagctgtaccacctagtttatgacctattttctaccttttcgattgtaacaaaatattcacccaaatattggaaaggccaactttagccctacaccaccttagcaaactacacaggtgcagaccctgtatgagaaagctggttcgtttaggtaggctgaatgtaatgaaagacagggcaaatgactgctgaagaaggcttcatatagtacccaaaacaacagaaatttgatgacaaagctttgtcaaaactacaccaccacacgcgaaagaccacccctatcccagatcaaccagactaatgtctacctaacagtctaaagcccctggtatagcatcttccataatcagggctaaacgtgctccaggctcctctccttccatctccatctggccagaaccagcccacacttgcaggcctctgtgattctgcttgcactgctgactgtgccgggagggccgcctccacctccaagtctctgcttagtgacatcctactcttctttcgactcagctgagcacctccatctctaggatgctttcctccactctcccttcctcacaactatttctgcttatggtccgcctacccttctctttggcacttactgtacctaccataatagctatggttattaacaatataaactaatagccactactgttttctgcgtacctcgtatgtgctgagcacgtactcatcagtatgtactatgtcatctaatccctccagtcaccccgtgaggcaggtgttagccgaattttacaggggacggcttaattcacttgcccaaggtcaggagccaaagatggcgcaaagcagagctccacaaacgtgactctgtgaatgaggcctcccgcggggagccacacaggtgaagttaaacaagtgctcatttcagcgccgggcccgaggaatgctaagcacccgtggggctccgtttagatgccggaagaaatgcaaatgctcctggagaaaactttgtcctccagcgagcggagaacacaggagacgctgaacaagcagacccgccgcgcggcagttgtccagtctgctgagtggggaggacaaggacctcccaccgggcggccacagcgtgtgcagaggtcaggcccccggcccggcgatcccagctcccctcaccagtgtccacggtctcacaggtgaatgtggacgccgcagatccgtgagaaacccttccctccccaccccaccccggcccgccggcttctcactgtgggtgggcgcgcgtgggtggagaggggcgcggaactgctcccaggtagtcggagctgcagtcgcgcacacctccgactacacaggtggagggcgaggagcctccgaaccaaagtcagaggacggggtatcctcctgccgacccgcgcgcaaccagcggcccagggagggaggagacgtgcacaacgccacgacggacggggacaggtttccggggacacattcgctcggcggggggcgggagcctcggacgcctcacctctccgcctcagcagcagcgcggccacggcgctgtccacgccgccggacagggcgcacacgacgtgccgcaaggcctgcatccgccagtcgcccaacttcgccagctgcagctaccgccgcttccgcgccttgccggaagtcccgccccggccgtagggtccgcgctagtggcccggccggaagctgcggcagcttacccgcgttccgtccggccttcccctgtcccgcggcgggttcccctgtctccggcctgcgctcacccctgaggctccaccgacccgcggggcgccgagactctgtcgggccgcgaggggctggctttttttttgagccgccgccttgccctccccacccgcgccccggcctcactgctcttcttctgcgctgtaaaccaaaaataaaattctaagccccccagccagccattggaggcctcctctcggccaagggcgtcctagagggaacctgaaccgcgagttcgggctctgatgggaaaggccgggtgggacccgcctcactagaccctcctcctccctttggaattcggaccagcattaacgtcaaaacagacttaagactgtctaggcggactctccgtagcaataggataccgacatgacagatggcaggccctgaaagatatcgaagtattttacagtattttaatttaatttaatttttaattaattaaatttttttgagatggagttttgctctgtcgcaggctggagtgtagtgggcgcgacctcggctcactgcaaccttcacctccaagattcaagcgattctcctgcctcagcctccctagtagctgcgattacaggcgcccgccaccaagcccagctaatttttgtatttttagtagagacggggtttcaccgtatttgccaggctggtctctcactcctgacctcaagggatccgcccacctcagcctcccaaagtggcgggattacaggtgtgagtcactgcccccggcccagaaaatctttgaatccacctatgacctggaagccccaccccaccttcgagttgtcccacctttccggaaccaatgttacatcttacatgtattgatttatggcttatgtctccctaaaacgtacgaaaccaaaagctgtagcaccaccagtttgagcacgtgttctcaggatctcctgggactatgacatgaataaatatcttcaaatcttttacagtttgactccaagcatactcagcactcaatccttaatgtctgtgaggtgtgttggacaggggttttgtgttctgtccactcctactccatgcccagaaaagcccctggcccagggcaggtgcttcataacctcgctgaataaaggaaggaggagagaatggaggtcatcccccaggggtgatattcaagctgagttcttctctacgagttagcatctagacaaggtctacctaaagcacagggagactctgaacgaaaaagatgttcatttgtgaatagggcattgcaatgggaatatgcatgccacaataagctatgtgggtattcagggaagtaaaggaagacaaaggtttttattttatttatttatttttttgagacagtctcacttggtcactaggctggagtgcagtggcgtgatcttagctcactgcaacctccgcctcccgggtttaagcgattctcctgcctcagcctccggagtagctgggattacaggcacatgccaccacacccagctaatttttgtatttttagtagagacggcatttcaccatgttggccaggatggtcttgatctcctgaccttgtgatccgcccgcctcggcctcccaaagtgctgggattacacgcgtgagccacagtgcccggcctaggaagacaaaggtttttaaagggaaaatgaggatcacatcattgttttgagataattctttggctacaaagatcaataacaagggtgacagcactccagggttggacaagcagttgctgggcagatgtccttgcaacagaagttttttgttttttttttttttttgaggaaggttacgatagcctttgtgtaaagttgtggtttttgcagtcttttgtgatagttgttattattaggcacatgtgcatgagaaccctcccttgtggtatgaacccaaagtacctgagacaggtttcaatttagaaagtttattttgccaaggttaaggacatgccagtgacacagcctcaggatgatgtcctgaggatatgtgcccaaggtggtcgaggcacagcttgctttgatacatattagggagacacaggacatcaattaatacgtgtaagatgtacactggttctgtctggaaaggcgcaacaactgggggtggtgggcagctcgcaggtcataggtagataagagataaactgttgcattcctttgggtctttgatcagcctttcactgaatacacaatctccatgtgagaggcaggtagaggaacagtcactgatgccttagtctggctcagtgaatctgcattttcacataaacaatagggcagaggaagcaatcagacatgcatttgtctcaggtgagcagaggactgatggtgagttgtccattgtctggcatctgtgaagataagctatcaatttacattgccagggtgaaattcaacagaactattttagggtaaagatctcgaggtccacgaggaatttccaagaagaaaagcaggaactaccaacaggagagccctggggactggtgccaggaggagctgcaagacaggagggaggtcacagggcctgtggggaaaaggatgaccactttttcagaataaaggatcaggaaaatacccaacaggagggcaatttcatcttgcatttcccggaagagataaggaaatccagtatctgggcagctgagtttgtgcagatttagaggtacacgtttaggctgtgtctaaacttgagtctgggtctgggggcaggccctccttgggtgtggcaggctgatctaaggttatggcaggttaagtcccagttgcagccaacccgcaaaatggctgagatccatgctcacatattttctgctactttttggttaactatatggtattttaggtactccgtagctccaagaggcccctgtgtatcacccaggtccactacaggctagttatggccaggatgacgacatcccaggtgccgcctgccaacagcaatgtcagagacgtggatttcagagatgtaaaatgggaagacatttgctccacaaaattaatgaaatgtggtaaaaaatcacatgaagttggacgtcttggacctgggagggtggccctccagtggcagctgaggtgttcggtgccatcctatggagaaaggggctggccctcctggggccacggagcccttcagtctccaactaactgtgcatcttcccacccggagccctctgaggggtgaaccaagggcctgtgtaccaggagagggagtgggggagctcagactgggtggcttcggcaggaagagcccagtggagaaacccagacagaaaggaatgggcctggagcctcaggacaggagcagctctgctctgtccagctcctgctcctgggccctcttcctgtctgtctgtagagagttaaagtcagatcactctgtctggcctgggtaccaaggagagcctggctgcactgaagccgcaccggggaggggaagggcacaggggggaggagccccagcagcgggattggggccacaggccaaaggctgggctcacccccagggcctgaatggagacaactgaggcacagcttggttacagatgagctgggagctgaacatctccctcctctacccagtgggaagccctaagagggaaggggtacctgagcgctgcaccccgctgcacccagcagaaaacagcctgacccatagcagagcctcagtaaatatttgctgcatggtttaatccaatttcagatttccttttctacccctgggaaatgagggccagaccagaggttccctgaggaccctccggtgtcactaccaggcccctgggattccctgctgtcccggagacgtggagccgccgtgattcccacgggcccggcgactctggccagcgcaggactggctgaaagtcttacctggggagtcactgctcatggagcggggcttctctggcttcatgactcacacatccaagcagctctgcctgtggggagcttccgtctgcaggcgcagcaactcagccgtgagaagcgcgccacctttccaccatggcagtttccaccgagacgtctttccacggcatcgcctgtccaccctacccctccctgctctcgacggcagaggactcgctgttccgagtggcagctttagaatcacgcagtaaccgcaggaagtagagagcacagcacagtcatcattttccctcatctttgtggacagaggcagatcctggtatgacccagggagcactggagtggggtccgaaatacagagtccggccgctggctcgctgctgtctgccatgaagccgctcaaccaaggtggtaagtttcctcaagagaaatggacacaaagtagcggcttcctggagctcgttttctaaataaagggaatgggctttccagtggcactcagttcctgccactgcccactgagcttgtcgggcccctgctgagagcaaagctgaggggtcctccccgaggcctgcccagcagacgccgtccatcaccttagtgtccaggtaagcccggcctcctcgcccatcctctttccactcataccctcgtctccccagagcagcttcttctcaaggggtgtgtctcaggccatcgagtcagcatcacctgtgtgcctagtaacaattactaggctggccccagacctagaaactagtgtatctgggggcgggcctgggcctgcactgacatcaatttttattgactaatttttgaaaatcacttgtatgaaagcattcgagtctagatagtagccttactgattagagtgataaaaatagctatgcatgtttgaaaatcaagataagcttaaaaatcaagatatgcttcaataagtccatttattttacaatttaatgtaaatctagaatatctaactatttatacaaacttaactttaaaaatagccacttgctattttacatacaaaacattcaaaagaaaattcttcatttagagtgactgaggcttcacattccagcccagagaatggcagcgaggagggtggcggcgggaagcagaggccttgggtggtccgtgctggccccagtccctcagcccaccctctccagcactgggaatatatttatgcttatttttctttttcaaataaaacttctactaaaacatgtttctttttttttttttccaagacaggttctcacattggtgcccaggctggagtgcagtggcacaatcacagcccactgcagcctgcatctccttgagctcaggccatcctcccacttcagcctcccaagtagctgggactacaggcatgcactaccacacccggctaatttttgtattttttgtagggacaggagtttcactatatttcccaggctggtcccgaactcctgggctcaagtaatccgcccacctcagcctcccaagttctagggttacaagtgtaagccactgcgaccagcctaaagcttgtttctgagggttgaaaaccactttagggctgttctttcaaggcaaaggatttggttcggcttagaacttgaggagtggggaatccacgttctccttgtcagcctcagggctcagctggatcagaggggagctcaggtctatgagctggaagagagcagagtggaggaggtgagcgtggatccggctagggcctcccttcccctccctgcacagaggactggctgcgtgggtcatcacagccactcgctcatcctggctcgggtgcactgaaaagcactctgggccaccacgtctaagaagctggaaggagacaggacacacacggagaagcccaggcccccaccatgcacattcctctgtcccacatctggccctggggtctatgggcaggagagaggcggtccctgtccaacaagagctggcagggtcctggcagggcacctcagaggcagctgatctttgagaagctcaggctgccaaaggtgcatcctgccctgaggtgtgtagctgagaagactcaacagccactctcaagggtcccacgatggccctgggaggatgaacaatcccagaactgaggacacccagggctgagtcaacatgaaccacctgccacttctcacctgtcccaccaccggtgaaggtttggccacatttttattcatgtctggagtgtttgtcatgaggtcgatcagaggcctgctttcagatcctacagccacgtgtgcttctggggtatcgcagaagtcgatgagaggaaggtcaatgaggggctggcttgcagcatctggagtgaccgcgagtggttccagtttgatatctacaagaagagcctgggtacaaaaccaaggttaagagcagagtccagcatctttctggcaaccatcttgggagaatgtgagctttgctcatgttccaggtgggctggcggtttggaaagccaaggaatcaggcggggccttggtggaaggaggctctgtatggggtgggccgtgcctctctgactgttgcccacctccctgtccatacccgctcaccagcagccaccagctcctgccaccctgcttcccgcttcctcagctttgatccctgacccttgccttagtcaaatgcagggctttctcccctggaggcctggaagtcctgactgcctccctttgggttgcttggcacggaggcactggccccaggatgaagcatggcagggaactccgccagccacagccctgggttccacgggcttcccgagcagcctccaggaatctcagctaacagaacccagctgcgcccgttctgcccacctcactaggggctgcatctccacccggcttggcttcctcccgagctacttctgtggcagtacttttggagaaagtagaatcgctttcctctggagaaaagttaagtgcctgaggcacacgggaaggaggagaacccctgtcaggggacacatccaccagcctggaatctgtctttctgttgctctcccttgttggttcagttctgtgggaaggaaaaaaacttatgagaaaatgtctctaaaatgctcgttcacttggctgatgtgggaagcaagtcactctggaggaacagtgtcctgggtggagtgcgtcccggctctagggccttcaccctccagacccccagtttcctgtgtatggaaggggctcagtgatctctccagttcctctcagctcacaaatcttagctgtccagcatcaccaggggctgatgttagccccttcctttctagttactaaacacaaggtaatgcgcacgcccgtcacctcctgaagggagcccagaccacacacagggacccctccttgagccacggccagctcctcctcgcatgcagctagtggggggcttctcctaggcctaggtgggtatgcagctggctccttctgccccagatgccccctcccctgctgcccagtgccctgatcagggctgaggccccaggtacaggctgcccacaccagctttccaatggcgtctcccacaggaccctgcacgggcgctgctgggcttgcctgctgcccacaggtcctcgagtacctgccacgcaaaactgaattccttccggaaacccagcaaagccgcaggtccatcaactaacacacagtaccttctttttaatacttcagaggtttcataagaaaattccaaaaacaagcagaattttgtttctacatttacacttacaaacatacaagatagttaaacacatattcctatttatatatcagatctggtgttttcagtgaggccttgtttctcattttctctttggcattccatgcctttccctctccctctgtaatgcacacacatgccagcatattttcttccagagtcttctgcattatcatagaactacatagatacacacagtgtcaacacctactgttggtagatgtacatacacagaaacatataagatatataaaaatgtgtaatttgtgtataaatacacggatattatatatgtttttttgttttgtttttcgtttttttgagacagggtctctgttgcacaggctggagtgcagtggtgcgatcttggctcaccccaacctctgcctcccagaatcaagtgattctcctgcctcagccgcctgagtagctgggattacaggcgcatgccaccatgatgcccagctaatttttgtatttttagtacagacagggtctcaccatgttggccaggttggtctcgaactcctgacctcgtgatctgcccacctcgggctcccaaagtgctgggattacaggcgtgagccaccgcgcccggctaagatagttaactttacacactagcatgatctgtttcaaaggttatacacgactgaggtgtgacttcattggaatcaggtgcctttttcaatctttaatcatttctgagctccagctatggcttacttcatgtgttctgggtcaatttagataaattttattttatttattttatttattttaatttttacagacggggtctcactctgtcccccaggctggagtgcaacggggcaatctcagctcactgcagcctcaacctcctgagctcaagtgatcctcccacctcagccccctaaatagctgggactacagtgcacgccaccacacctagcttatttttgtattttttgtagagatggggttttgccatgttacccaggttgatctcaaactcctgagctcaggcagtctgcctgcctcggcctcccaaagtgctgggattacaggcgtgagccaccacacctggccaataacttgcaaattttagaaaaccattaggttttcaaattgattatcagagaattacacgcagtatttccttgtaatacctttaattttcctctatgctcatgtctattgcattttctctttgcaatgaaaaaaaaaacaaacaaactttccaaatactatttacttcactaaaacctggagcaaggcaagaaaaaggtatgtcactgtctgggacagcaagcctaggaatttgagaccaatttattaccaccttcgtgtcttacctcattgcagagttcttgcggggctcagaggaacgtctccgagctggcacacacaggggagagcccacggccctgggcatcgttttgggggtcatcggtggaaggccagagcagcgccggctggcgggtgtgggcaaggctgacacacgccatgcgctcagcaggctttgtggtgctggcccagatgagcgtctaaccggggtgctgtggacagtgaccctggcaaacacaacatcagtgtcgtgagctgagatgacatagaaaaagtaagatctcatcattcagcctgtgctaatgcagtgctgagggctttggtttcagcccagaagagccaagccagggagcccgtgtgagctccgctctcctgggacaggccccaaggcgggcaaggctccgagctgctaccaacccatcctggcgtgggcttcgggctcccagtgggaatggcttcactgcccttcctcacaggcaactcaaaagaaaattgatcaaatgtgattacactttacggatgctaccattaaatgtcacttcacacgaggttcagaagagactgagcaaatcatctttcagttggtgtcatagatattgccataaggaagtcagagccgcagcctgtctggtgggccagcgaatgggggagcaggtctccctgcacgcccactcatacccaggcttaaggtcgcctgaatcagatgtgaacacaaatgagtgaagaggaagctgggcacttggtcctcacacccctcacgtccctggcaatacctgtggttcgggctacccatgggtcttgcctaactgttgctttcttgtgttgctgttgatgaagaagaggctgagtcaactggcatttgctgtggactgaatgtctgtgtccccagattcatgtgctgaaatcctagcccccaaggtgatggcattagaaggtggggcctttaggaggagatcaggtcatggagccaaagcctcaggaatgggatctgtgcccttataaaagagggcacattggtgcatacctgtggtcccagctactcaggaggctggagtgtgaggatcacttgaacccaggaggtagaggttacagtgagccatgattgcactactgcactccagcctgggcaacagagcaagaccctgtctcaaaaaaataaacaaacataggccgggcgggtggctcacgcctgtaatcccagcactttgggaggccgaggcgggtggatcacgaggtcaggagatcaagaccatcctggctaacacggtgaaaccccatctctactaaaaatacaaaaaatgagccgggtgtggtggcatgtgcctgtggtcccagccgctcgtgaggctgaggcaggagaattgcttgaacgtaggaagcggaggttgcagtgagccaagatcgcgccactgcactccagcctaggtgacagagcgagtctccatctcaaaataaataaataaataaatcagcataaaagaaacttgttcacccctaacccagtgaggacagagaaggcggcagctgtgaatcgggaaacaggccctcaccagacaccaaatctgcaggtgccttgatcttggatttctagcctccagaattgtgagaaacaaatgtttgttgttcaagctacatagtcgatagaacgtttgttatagtagcccaaaaaggacaaagacattattttaaaataaaatgagtcaaggacatcccaccaccatggcccctcgggaggccagggagacctgtctattgctctattctgggcaattgttacgttcttcaaaaggagcctgaaaacagactgactctagcctatttaaatggaagaaaagcaacgaggctgaaatcaagagagaaacagaatcactccagagagcaactgctgtcaaccccagctgctgctctccgcgaagttctaggattccccaccctcctccctttattgctaagttctggcagccccaccacaaattccagtgaaaataaaaattccggccaggcgcggtggctcacacctgtaatcccagcactttgcgaggccaaggctggtggatcacgaggccaggagatcgagaccatcctggctaacacggtgaaaccccgtctctactaaaaatacaaaaacttagccgggcgtggtggcgggcgcctgtagtcccagctacttgggaggctgaggcaggagaatggcgtgaatccaggaggcggagcttaccatgagctgagatcgtgccactgccctccagcctgggtgacagagtgagactctgtctcaaaaaaaaagaaaagaaaagaaaaattccaataaatgtaattctcaaagtaaccctgggtgaggtgaggaaactgaggcacagagaggcaagtgaggtggccagtggctgcctggctctggtctttgctcttcaccaccatgcatgggagggacggcagcttagcatggcaccatgcgcagcacgtgagggactggctagttcgacctcgcgaagcgtgtctcaagctcacacaggaggaaactaaagcccagagtcaccaaaagacttgcaagtggccccagctgagcttgggccatccctacttgacgtgaggaaaaaggtcagcaacattcgggaacttaaactggatcaaagaccaggaagtggtggagctgggattcaaagccaagtcaggccggacacggtggctcacgcctataatcccagcactttgggaggcagaggcgggcggatcacgaggccaggagatcgagaccatcctggctaacacggtgaaaccccatctctactaaaaaaaatacaaaaataattagccgggtgtggtggcgggtgcctgtagtcccagctactagggaggctgaggcaggagaatggcgtgaacccgggaggtggagtttgcagtgagccgagatcgtgccactgcactccagcctgggcgacagagcaagactccatctcaaaaagaaaaaaaaagccaagtcagaatcaaggtgccacgccagtgctcttcaactgcggtacaagtcacagtcacccaggagctttaggaaatccagctgctgggcctcagcctagatgaaccaaatcagaacccctggggtgggctgggcacgggcagtcctaagagcgctggagggacttctgctgtgcagcctggcatggcaaccacaccagtccagggctgggagctgccgtactgcatcgcggaagtctcagatgtcttaagtctgcagtagatctaaaaggggctggtacacatcaggagctcggcctgcacccaagagactggcgtggaagccagatgcgcaggccaggctgcagggttaccaaatggttgaggtaagcagatgcgtgagtcattctacagcaataaagagaggaagcggaccaacgtcactcacctgccaactgacgtgcacgactgcggccgctgtgcccgcgaaagctttggtgttgagctgtccggggagtcacctaagtccaagaaaggaagtgtgcggtcaggtaaagtgatcagggggagacctactgttgggggatcgtcaccgaatgggcaattctccgagtatctccactgtcccaacttgagtgtaggtggcactggctcagacaagtacacaaagggccaccctgctgcaggcagccacatgagaggcattcacccctacacggggacccctgcccaggcaaaggctgtggtctgatggatggacacgggggagaaagagaagagccatcttcactgcgccgccccaccctggctgtatatcccatcagggccgagcacgaccttcacagagcgaagtcgacttgtcagacggcacctgcatgcgctagacacttgcccacaggaacaacaccgcaggggtttagcttcccaggcacgcgcaacagagcccacattccctcattttcccgaaccatgactttactgggataataataattcattacactgtgtttgtgctgttttagttgacaagcatttccatgtgtatgatctcatctgatattcacaacaggatgaaaagcaggctcagagggcaaaggggtcaccagttaccgagctaaggcccaacacaggccccagaggtccagtcccgccaccacgcccccagacactggctccatggttcctcctcctctatactggctccttgaaaatcccagtgtgcacttgagtatcagcacatgtgctctggggcctccaaagcctcaggcaccaggacccccttggaacaccttgctatgtctgggaagccatgggaaaagaggctgtccctcagagccccttaccccagcaccaagagggaagggtggggcctggagctgaggcctcttctccacaggtgcttccaggaggccaggcgagggtccaggctgctgcccccacagacagcccctctctctggcaacagcacagctgctgctgggccctccatcttaacaagcctatgcccgccctcctgcgcctgcacccaagctcctgtcccacgtccctgccccgctttaaaccagatctcctcagaaaggctgcctgcacttacatttcctctctcctgctctttttttttttttttttttttttttgagacagagtctctctctgtcgcccaggctggagtgcagtggcatgatctcggcttaccgcaacctccgcctcctgggttcaagtgattcttttgcctcagcctcctgagtagctggaattataggtgcccgccaccacgcccggataatttttgtattgttagtagagacagggttttgccatgttggccaggctggtcttgaactcctgacctcaagtgattgcccgcctcggcctcccaaagtgctgggattacaggcgtgagccactgccccagcctctcctattcttttaaaaatcacctctatcaaagtgactcatgcacagtttttaaaaatgaaggttaaaattttatgagacaaacaagtctcccaccacacccagctctgcttccagcgtgctggaagcttcttgcgatgtctcccttcactcatttctaaatcacgcacccacattgctacctccgcattcttcagaaactccgtttgttacaagagttaagaatctgcccctcacacctccccaccgcccccacctgtgcgttcaccaggcctccatgttcaccccagcactggagaggcgcgcagctcgcacacagctgagtcaaacatgctcccaccctctctccacctccgttttcagtttgtttgtttcttttctttcttacaagaaacaaggtcttgctctgtcacccaggctggagtgcagtggcttgatcactgctcactgcagccttgaactcctgggttcaagtaatcttcctgcctcagtctcccaagtagctgggactacaggtgcccagcaccatgcccagctaaatgtttttgtagaatcggggtctcactgtgtcgcccaggctggtgtttgttttcttgtatggagtggggtggtctgtgactaagtcatcccataatccctgtcttttgggaacattcttgggtcactgaccccgcaccattcacagaggtctctgtgagacccaagttggtcactcctggcgggtgtggaggcaagcccacctctctctccctcgccgcctccctctcccttgccgcctcccgtgttggctccctctctcccgagaccccttcctctcggttgtcctctccctcagctgggtggagcgcactcttcagcagcttccatggtggcacgggaaggtcattcttatgaaacagaacacgaacaagccatctcctgacaccctcacgactgccctagggctgcctgagcacgcacgcctcccaggcccacatcagctcttccctaaacctggacggcgcgtctccactgcagctcccagtaccggggaggcaaagcccacagccagaattccaagtctcaatcctctgggtgacccggcagcatggactcatagtaaatagcaacatttgtaactggactgttttacaaagaatgctgcttgcctcgagtattttgagaaagtgcacatatgaaagcctccactacagggcaccgttcatgtggtcccacgctgtgagtgccctcagccctcacctctcctccacggtgacagctggtgtcacagccaatgagcaacaccaccagtgctctcagccaaaaagtgcacaccaccacgtgcctcccagagctgtgtgttcccaacagcgtggctgctcccctggggcctctcttccggccagtgctgagtttgtgggaccagttttgaccctgatgaatgaccaaaggcgtgcaagagacagtcctgttcccagcattgtggagagaggaggaaccgcctgccgaaggtgaaatgcacatctgagaggtgcgtaaggagaccgcagggacacgctctgggaaacagggcaaagccaacagggatttgggattagcagaagtcctgtggcatcaagcagcccgacagccaggagaccagccaacacttgtgccaacgtggtcaggagagacatggcagacgcatgtcctggctccaggcattcaggcagaagggaagcaaacactactgaacacacctccacatgacctgggccgtagggtgtccctgcagaacccacccaatcacagctcgcatttcttttctttctttctttcttttttttttttttgagacagtctcgttctgtcgcccaggctggagtgcagtgacaccatctcggctcactacaacctctgcctcctggctcaagtgattctcctgcctcagcttcccaagtagctgggattacaggcatgcgccaccatgcctggctaatttttctatttttagtagagacagggtttcaccatgttgaccaggctgctctcgaactcctgacctcaggtgatctgctcacctcggcctcccaaagtgctaggattacaggagttagccaccgtgcccagctcacagctcccatctctacaaactcagctctctgctgttgaaacctacactgaggtctccagctgtggcttctcctctgagctctcagcctgctccacccctcagctgcagcctaagtggcctctcaccctcactacttccaaaatggggccgtggactctgcccgctgcctcttccagccctcctgtcacatgagtggcagcacccaggttccgccagaacctcagggacactcgagtccctctctgcactgccacatgagccctaagctaccagaacgtcaggcagaccgcagcgctccagcctccttccccagcactagcttcctccccaacacagtgagggccaggtccgcattaccctccccaccactcttcggcccagagactctgctcttccctctgtggagggaccttctgaaggtcaagtcgctctgctctgatctctcctatgcacgtcctcctgcactgacggtactccagggtccgctctggtcacgcggcgctctgggagccggcctcgggctgcccctccatcttcatctcttcttaccctgcccctcggtcactgactggctgaggttgctagtttttgttcaacagcaactttcctcttctcagtaagaaatttcagctgtgtgcggaataaagacaacgtgtcctagcatcctgtgcagggaagcgtcgtactcaatgggacacaaacggagtcacagggacaacttgcagtgagggtccttgaaaggtggggatttgctcttcttcacctagaagaaggcttcctgccgggaggtatgagggccagagccggtgcagccacactagaccatgaggatgagaagctcatcacggcagcacaggatggagtaagcctgggtccctgacaccaaggagtactgaccagctgtcgcacgtctacgcagaatcccgaccgcagcggctgcactcccaccctccggcccccatgctgctcccagagcacgtcccacgccttcctgccccaggacctctgcactcctgccgttgcctctgcctggagtgctcccccttgcactttcctaccggctgcctcagtctcctggttcagatctcagtcccgtgtcacctcctgaccatctttgccaaagaaccacccgatgcaaattcctccccaaacatgccagctccaggacaccatcttcccttagtccctttgttgtgctaggatctgcaggcctgctcatctgataacatttcgtatcttttcctattaaacagaaattctgtgagagtaggtctgtcttatcatgatgtcccttgtcccccaaagcattccagcacagagaagacactcagcagaacagcttgttcctacagcaggactcagaatgcagtttctgggagttgcaggctgcctgtgctggccggcactgccagaacttaaaatcctcaagcacccagagggcagatctgcctgacagaggaggccaggacgctcctctcaccttaagtcagctctgagaactttctgcattgcacacaattgttcaagaaattcatgaaaactttacaaacacccacccactaatggccagacacctgctggggccagtggcctcactgactggagaaggcagtggctggagctcaggaggctgaggtggctgcaatctgagggccagaaactagagaggagggggctactccgacagaacgagctctaggaacccaagggaatctcgagtctctggctgagcaccaggcagtgcacaggtgcagggcaggagtcctcaaggtcaagagaagagcaactaccagggagcaacgagcggagctcacagggccgagaaaccgccgtcttaccagggagcaacgagcggagctcacagggccgagaaggtgtcatcttgcagcagcaggagtgcaggggtctcgcgggccttgcgggacacacgggtgtgcagcagaggccttgggaaggacgccggtggcgggaggcggaaaggctatgctagacccaccacttcaaagcataaaaagcctcggaaggatgatctgcaccttaactgcctgccaagcccaacccaactcctcagagaaagacaacaaaatccagacattcaaaagtgtacacctgacaatatccaacaaccaagaaaaacttgtgaaaaatgtagaggcaggaaaatgaggccaaaacccggaaacaaaattagtcagtcgaaacagaccccaaaatgatggggaagatggtatgagaagaatcgtagaccctaaaaccattatcaatttgctcacgaggatgtaaaagaaaacccaagtaccatgagaagaaataaggggaaactattatgttagaaacaaagttaactggatgggcttcacagctgttaggcactgcagaagaaatgatatctgacaacagaaactacccaaactgtagctcaaggaaaaaggctgggccgggcacggtggctcacacctataatcccagcagtttgagaggccgagatgggtgggtcacttgaggtcaggagttccagaccagcctggccaacatggcgaaaccccgtctctaccaaaaatacaaaaaaaaaattagccgggtgtggtggtgggcacctgtaatcccagctactcgggaggctgaggcaggagaattgcttgaactcggtaggtggaggttacagtgcgctgagatcgcgccactgcattccaccctgggtgacagagcgagactccgtctcaaaaaacaaaaaacaaaaaaaaagaaagaaagaaaagaaaaaagataagaaaaagaaaaaaggctgaaataaaaaaaagaacagagcttcggtgtcctgtgagacaacgtcaagaggcctgaaatagatgtgattagagtcctaggaaataaagtggaaagaggaaaagatagctgaagaaataatggccaacgttttccaaatttgctgaaaaaaaccaacccacagatcaaagaagcttaagaaaccctcagcgggataaaggcaaagaaagccacctcaaagcacataataatcaaattcccgacagtaacactaaagagaaaaccttacaagcagcctacgagcattggggtgtcacacacacaggaacgaacgtaagacattcagggagcctccagtgaccccccaaaacaacgtgggcgagaagacagcgggtcacacctgaaagcactgttggaggaaagaactaaaaacaccatcaatgccatcaataattgtttaaaactttaaatgcaatttcttcagtattttttaaagacacattaaaatgtatctattactcaccaatagaaaacttaggaattttaaattgatttgtaggagtaggcataacctttgtcttggaatttagacaggaatctcgccgtctgatacttctagtcttattcaattgagaagattctgaccaagcgcaactggagttcagccactggccgccaccttccggagtctggggttgggtgggggatgctgaggggggtgccgtgagctgctccgctgccagctcagaaacatcgacccgcttggcctgccaggaggatgcccccacagggcctgcaggcagagctggccgcagcatggcgggtcccattctgcctgacttgctgatgtttgacagaggccgggagctatttgcaggaatacttgcaaattcacttgatttagctagaaggtatacacacaaaaatcacattattataaaagtatgaagctatttaacaaacacacagaagttatgctgtctttagcatatctaccttaaacataagacacattaacaatattctataagcccttcaggcaacatcatcaaacacaggatggctcaggcagcttttagcttagctgagtgtattctaaggtacttattctcaaaataattactaacatgtacataagcatgcataaattcaagctctcctatcttcgttgattatgttggcaggagaaatctacattagttgagcagatggaaggggatagtctagtcacatgtctcacctgtctggtcacagaggtgggcagggaacaaggaaaaaagacgcaattgttactggttgattcctttaaaattacaaggaggctgcgtcatattaaccataagcactatttaaaatagaagaccagataaactagggtaatacatactgagctaccaatatacgcagacgatctggtaaaggattcttaaagaaaaactttagcccaggagtggtggctcacgcctgtaatccaaacactttgggaggccaaggcaagagatcactcaaggccaggagttcgagaccagcctggctaatatagtgagaccatcctctctacaaaaaacacaaaaatgtgggccaggcgcagtggctcgtgcctgtaatcctagcactttgggaggccaaggcgggcggatcacgaggtcaagagatcgagaccatcctagccaacatggtgaaaccccgtcactactaaaaatacaaaaattagccgggcgtggtggcaggtgcctgtagtcccagctacttgggaggctgaggcaggagaatcactcgaacccgggaggcagaggttgtagtgagccaagattgcgccactgcactccaacctggcaatagagtgagactccatctcaaaaaaaaaaaacccacaaaaattagccgggtgtggtggcatgtgcctgtagtcccagctactcaggaggctgaggtgggaggattgcttgatctcaggaggtcatcacctcagtctataaagataaggacacaaacctctcttaatcacagaatggcagagtcagaattccagatcagatcaatctgattagagagttcacacttatcatttttttttttttttttgagacggagtgcagtgatgcaatctcggctcatggtaacctctgcctcccgcgttcaagccattctcgtggcccagtctcccgagtagctgggactacaggcacccgccaccatgcccggctagtttttgtgtttttagtagagacagggtttcaccatgttggccaggctggtctcaaactccaggggtcaagcgatccacccatcttggcctgccaaagtgctgggatcacaggcgtgagcccctgcgcccggcccactttttacattttgtgaacacaatccacaccatgctgccctgaacgaccccgagacgccacatggccaatgcacctcgaagaggatttcgctctgaagagcagaaaggcgaaggctttcccttaccactagatggcagctgtggcttggcaaggttgaaatgtggcttgacctcaaacaggtgtgggagcatggatttaaacaggcacccaggagttatggggccatatgccctacattatctggaatagtcctattttaaaactggtgtctcatgacatggacatgagggtgattccagtgtccatgttctcaggcacggggtatcatacatgctttctggccatgtgtaccccgtagactgaagccacccatctgagtgtgccctcctcatgggacagaggcactgagggcaggtacagcaactcagtccacagcctggtccaccgcacacagcacgccctccgggacgtcctgccaagcctaagtggttctgcagaaacagtctccaaggcctgagcagcactccaggcctcacctggccagatgtgggtccaagcatgatgccggctgcctcacctttgcccactgctggggatgtgcacgcactggatgccccgctccaaacaggccccgaggaggacttccttgcgagattgctggtagagccgggtgcttttaacagggtcttcttcagccccaactggggcaaaatgtgaaaaaacagaatcagcaaagatctcgttatttacctattacttgtgtctgcaaaagtaaggggtttttggctgggcacggtggctcacgcctgtaatcccagcactttgggaggctgaggccggaggatcacaaggtcaggagtttgagaccagcctggccaatatggtgaaaccttgtctctactaaaaatataaaaactagctgggcatggtggcaggcacctgtagtcccagctactcgggaggctgaggtaggagaattgcttgaacccgggaggtggaggttgtagtgagctgagctcgtgccattgcactccagcctgggcgacagagtgagactccgtctcaacaacaacaacaacaacaaaagttggtgtttttactattttaaaataatctaataattatcatcttgaatttaaagaagaaaaaagtcaagcagcacttctcaaagtgtagtcttcaaacccctgcatgaggaccacattagggagctagcagaaatgcagatttggggccccaacccagaccccatgagtcagcagctgcagggcccagctttgggcagttctaacaagaactgccagtacacacagcttggtttaccgccaatgccagaaaataagtggcaaagatgtggctggtagtctccatgcctgtgaggaaccgcaattttctttcttttccttttttttttttttttttttagacagggtctcactctgttgcccaggctggaatggaatgcagtggcatgatcacagctcactgcagccttgacctcctgggctcaagcaatcctcccacctcaacctcccaaatagctgggaccacaggcatgcaccaccatgcctggctgatttttattttttaatggagatgggggcctcactatgttgcccaggctggtctcaaactcctgggctcaagtgatcctcccgcctcagcctcccaaagtgctgagattacatgtgtgagccactgcacccagctgctgttttcaaaacatcaacatctcatgtcatctgttcaagaactctacatgagggaaacggaatatccccacctacaaactggggctccgagacgctgacttttcccaacccacacagctcccagggcagaggctagccatcagtgcacactgcgaagccagtattctttgcatgtattttgcaggctgcctcttgtgggtgtattttcaacttttccacctcttttttttttttttttttgagacagggtctcattctgtcacccaacctggagtgcagtggcgtgattatgactcactgcagcctcgacctcctgggctcaagcaatcatcccacctcagcctcctgagtagctgggactgccgttgctcaccaccatgcccagctaatttttgtattttttgtagagatgggtttcatcatgttgctcaggctggtcttgaactcctgggctcaagtgatcctcccaccttggcctcccaaaatgctgggattttaatccaaagcacttgtacacacagctgccacctcattcccagcaaccacaagtttgggccccagcagccaactcaccttgtttggaacagggatcgcccgcttgccctggcccaagtggcttccggcggccggcacattgacagcacccggggcaggtttgtcagggagaacatcccggtgggattccttctcagctgggatttttgtcctggaaggactagctggaatctctttcttgggctgaaaattttaatttgaactgtgagaactgtctagtgcttaacaatgtacagagatactcaggcttccattcagagcgagcctaggccccatcttccccagtgctacacatgcccctccattcatcagccagattgaagggaacagggcaagcagttcgcatcctccaccaaatcactatggacataagtgatgatggattttgcttcctcattaaaaacagcatcaaatgatacctacacagatcattaataggagagaggttctctaaagccattccccagtcaggatccttatttaagaatgataatgagaaagctggtctagttacacaaattttaaaatgctgtacagaaaggactcatccattaaatggtcatctctaccagagaagctgctcaattgcaataaatcttcttggtctagtactgaaagccattttctttggccagcagagtcaaaaaataagttcttgacatatttagggacaagggcattcatggaactaatttatacttacataaatagcccccttataacaggagagttaataaggtaacagcaatagaagctcagagtggtaaagacgcagcagtaactttttccctttatagcatttctaaaaactgagatacttctcataacataaaattcactattttaaacagtatacttcagtggtttttagtagatctgttatgttgtacaaccagcacaagctaatcttaaaatatagtggtgtcccaaaaaagaacctgtactcggccgggtgcagtggctcacgcctgtaatcccagcactttgtgaggccgaggcgggcagatcacctgaggccaggagtttgagaccagcctgactaatatgatgaaaccctgtctctactaaaaatacaaaaattagccgggcgtggtggcgggcgcctgtaatcccagctactcgggaggctgagacaggaggactgcttgaacccgagaggcagaggatgcagtgagccgagattgcaccattgcactcctgcctcggcaacaagagcaaaactctgtctcagaaacaaaacaaaacaaaacaaaaaaaaaaacaacctgtacccattagcggttctcccctttccctcatcctccccagccccacctagggaagcactcaaccacgcctctgtcattggcctgtcatagtcatttcatataaatggaaccatacgacatgggaccttttgttatggcctctctcactgagcaaaatgttttcagtggtgccatcttggctcactgcaacctccacctcctgggttcaggcgattctcctgcctcagcctcccaagtagctgggattacaggtgtgcaccaccatacttggctaatttttgtatttttttgtagagacggggtttcaccatgttggccgggctgggctcaaactcctgacctcaggtgattcgcccaccttggcttcccaaagtgctgtgatcacaggtgtgagctaccacgcccagtagtgtttctttttattgccaaaaataaaccattgtttggatagactgcattttcgttacccaatcatcatttgctggatgcctgggttggtcctacttttttggctgttatgaataatgctgcttcgaacatctgcatgtggatttttctgtggatatggtttcaattctctcaggtctgtgtactaaggagtggaattgctgggtcccatgggaccctctacatttatttttttgaggagctgccaaactgtttccacaacagctgccccatttcacagtcccaccagcaatgcgtgagcttccagcttctccacatcctcagccttctcctcatcctccacaacatcctcatcctcaaaataacacctgttattttctttttcttcttcctttaggcatcctagcagttctctgtcaagcacacttgtaagtaggtgttacactcaagtggtccacccattgctaatgactcctcacaggagtgagcatgtgccatgagccactctagaagtgacttctcccagagaaacatgcaggacatggtggggctcccacgtgtgcatgagtgcatctcagctgtgcggacagtgccctgtccactgggaacaagctctctggaccccagctcaccacccaggaccaggagatcaaaagagatacttcgatgggtctggagcagcccaaatcacaccacctctctccccgagtccacgcgtgctacatgcacaatccctgtcccgagtccacgtgtgctccacacagcaggacccatcccactctcattctagaaacatcacggtaggaatctacatcccaaacgggctccaaataaaggagtttgcaggccccagctgttgggggtggcagtgccgggcatacctccttgtcaagggcagtgtgtggcgtggcggctgcacctcggctgccttccatccttggctctcaccacagggagtcatgtggctcaggagatgggcttggtgggggtaaaggaatttctgggcccttgctgagcattctgcatttgcctgcacctcctatcagccccacccagggtcattcctctgtacgtgctgcccaggggagggggcagagctgggaacgggctgcagggtgggccccggggctcccacccgccccgtcttcctctctgtggcctctcccgagcaagagccagatcgggcagccctggcagcaagtcctgtgctcacacccagctttcccccagacctccaggaccctcagtgtcccagagtaggcagactgcacccaaaggcacccctgtcaactgccacctcccaggaaagctcacctcactcagtgcccaggaggaatgcagtgtaaactgaggcacggtcaaggaggctgactagcagccattgcagaggaggggagtttttggaagaggttgcttattaaagcaaatgaaatccctactgtgtggtatatccagcattgtaacaaaacaaaaggaacaacttcagacagaatttaggaggaaatattaggtcaacccaacttatccaagccacccccacatcagctccctattggcaactgcttttcctggactccgcattcctgtgttttgtaggcctcagagactcgccacctctgaggctttccgcatgtggcttctgtgagagggctgaggggcaaggagtgggggctccccaggcaggcgctctgctgtggcatttaccttctccgcagccccagggatgcttcttcctctaacagaggccgctcgaggcagcagcaatttggtcccgggcttcctctgagtcgctgcctgacttgcagcatgagcagtgcatgattccctgggcaaagcatgagcagagtgcggaggccccggcgcccgggtgaggcgggcctgggcaccagagctgggcagggccggggaggaggccaagagccgaggctcacccacagggggccccagcaaggggctgtctgacaggtagtatgtctcccttttaagagacgtggggcttttcttcatttccttttctttctcaaagaggtttatttttaattttgactcctgtatgaatctttccacgccctggctccgagggtcttcaggcttggcagcttgggctgcctggttccggctgctgctctcaatgtgtaaagccagtaagtgagcttctttgtacacctccacgaacttctccccggccagagggctccaggcaaagggactctcagatgtgggcaacggaggctgttcgggaaccggattatttaattccaagctggcagcaatacatctttctttatgtccaaagggtccgaagaagacttcatcatcttcatttgcactatttgtttaaaaaaagaatgattaataactcataacactggcatttaaaggaaagactttactgaatgtggttatgcccaaggcaagggaagaaaactcatttgtttacctcgaagaagacaatgaaagatcgaagtcaaatttttcatcggccaaaagaagaatgtctagagggaaaaaatccactgttattttagtgccacagctgataaagagaaaaatattaccaggctctatggcttggaattaaataaaggtactgtgaaatttcactccccaaagtgtatcctgtcatgatgctaatttagtttttcatagggggctctaagttatattttttcctttttaaaaaattttttaaattttttctagtgacgaagtctcgctatgttgaccaggctggtctcgaactcctggcctcaagtgatcctcctggcgtggcctcccaaagtgttggggttacaggcgtgagccaccatgcctggccagttttttttttttttaattgcatcagccggctgggggcggtggcttatgcctgtaactccaacactttgggaggtctaggcgggcagatcatgaggtcaagagatcaagaccagcctagtcaacatggtgaaaccccgtctctactaaaaatacaaaaattggctaggcatggtagcgcacacctgtagtcccagctactcggaggctgaggcaggagaatcgcttgaacccaggaggtggaagttgcagtgagccaagatggcaccactgcactccagcctgggtgacagaaagacactctgtctcaaaaaaaaaagaaattacatcagccattctatgttcactaagccacccaaaagcttaggtccttacttttaagatataatctaaaatgcattcactgactcattcaactagcttttcaagaagagataagtcattttccaggtatagaacattttcaaaagaccaccttcctcagctcccctagaattaaattcccctcttacaagctacaaaacatctattcatagttcaacaatgaatttaatattactcaaatgcacggagtagggactctataagaattcgttgaccgccattgcttcttggagtccttcctgaatcctcagatgaaattactctgtaccccaccccatccataattctatcacagctggcatggccctgtctgcccaggtccctctaaaacagatcacaagttccaggttagtgggtccctctgcaggggcacctgctccctcctccagctccccgcaaggctcccgcagtgcctggacctcacttctaccactgcactagcctctgtgagtgcctcttgacccttctatggccccaactagactataagctcctccaagataacagtgtctaacactaacccaaattcccaaatgtccagctaagggcctggacacttagcaaatatttatcaaaatgcactgaaatacagtatttgctcaatactgtaaagcttataaagctctcccataaatgtttttatcttaataaacaatgaaggccgggcaaggtggctcacacctgtaatcccagcactttgggaggctgaggcaggcagatgatttgtggtcaggagttcgagatcagcctggccaacgtggcaaaatcccatctctaccaaaaataaagaataaaaaaattagccgagcgtggtggtgtgcacctgtaatcccagctactggggaggctgaggcaggagaattgcttgaacctcggaggtagatgttgcaatgaaccaagattgcgccactgcactccagcctgggtgacacagcaagactctgtctcagaaaacaaaacaaaacaggctgggcgcaatggctcacgcctgtaatcccagcactttgggaggccgaggcgggcggatcacgaggtcaggagatcaagaccatcctggctaacatggtgaaaccctgtctctacaaaaaatgcaaaaaattagccgggcgtggtggcaggtgcctgtagtcccagctactcgggaggctgaggcaggagaatggcgtgaacctgggaggcggagcttgcagtgagcagagatcgcgccactgcactccagcctgggtgactgagtgagactctgtctcaaaaaaataaataaataaataaaaataacaacacagcatgcttctcaaaaatcataaaatttgaaaatatactaatatcctaatttggtcctgattaatcaattattcttaattacctaatcaaggagaagtcagaacaaatgcacaaaagaaagaaaagagaaataaccacacagagagggaatgaaaagatccataagcacatctgtcaacttcatgcacataaacctaagaacttggctgaaagagataattttctaggaaaatataattttatttattcttttttttttgagatggagtctcactctgttgcccaggctggagtgcagtggggtgatcttggctcactgcaacctccgcctcccaggttcaagagattcttctgcctcagcctcctgagtagctgggattacaggcgcgcgccaccacaccgggctaattttcgtatttttagtagagatgcggtttcaccatgttggccaggctggtctcaaattcctgaccttgtgttccacctgcctcagcctcccaaagtgctgggattacaggcgtgagccactgcacttggtatattctttttatttttttgagatggagtctcactctgtcactcaggctggagtgcagtggtgtgatcttggctcactacaacctctgcttcccaggttccagcgattttcctgcctcagcctcccgagtagctgggattacaggcacgtgctaccacgcccagctaattttttgtatttctagtagagacggggtttcacaatgttagccaggatggtctcgatctcctgacctcgtgatccctccatctcggccttccaaagtgctgggattacaggcgtgagccaccgcatccagtctattttttatttaaattgtctaaatgtacttatttataaaactgactccagaagacagggaaaatcttaatacttcaataatcataaaataactggtgaaatttattaaagagctatcctcttcaaaaaagcgtcccaactagattcataggataattgtatcaaaacattaaagaacaaataattccaatactatttacatcactccagaggattaaaagaaaaaaaactttccaacttacttccacgaggcaagtaagtatgttaccaaaaaacctagaaagtgatcaataaagaaagtaaagaccagccttacttacatcagcataataatcctttttctttttttgagacagggtctcgctctgtcacccaggctggagtacagtggtacaatcatagctcactgcagcctcgaactcctggactcgagggatcctcctgtctcggcttcccgagtagctgggactacaggcacgcacaaccatccctggctaatatttgtattttttgtagagatgggatctcctcatgttgcccaggctggtctcaaactgctgggaacaagcattcctcctaccttggcctcccaaagtgctgggattacaggtatgagctaccacacctggcctaacatcaaactctttaacaagaataccagcaaaaagaatcctgcaaacattaaagtggtaataacataacacaaccaagctccctgcatttcatgactgtgagatggtttcatttcatacaatctactcatataatcattttattactagagctaaagagaaaaccatgatcgtctgcacatatgttgaacgggcatatgataaaatacaacatacattcttgattttagaggctcttaataaaaagtaatagatatataaggaaatccccatctcaacccaaagccagcattaggttcagtgggataacgtcagaagtattccttctaaagacaggaacaaattgatcttaccagttaggataggctaacatgctgaagtaacaacccttaaaacaacaaaggtaggccaggtatggtggcctgtgcctgtaatcccagcactatgggaggccaaggaggatcacttgaggcccaggggttcaaggccagccctcgcaacatagcgagaccccagctctacaaaaagaaaaaaaaaaatgagcggggtatggtgccatatacctgtagtcccagctactcaggatgctgagcccaggagcttgcggctgcagtgagctatgatcaagccactgcactccatcctgggcaatagagcaagagacactgtctcaaaacaaaccaaaaaccacaaaggtatatttctcactcaaactatatgtctgcagaggggtaggctggggccctgctccctggcctcctcactccaggaccccaactgatggagcctccaccatcaggaacaccgctcgtctccatggcaggaaggaaaagaaccaattccacactggttcttgaagatttccacccagaaatgacacacacgacaacattcccatttcactggccaagtgagtcaccagagccaactgaatttcaagtgaacagggagtacaattctattacatgcccagaagacaaacacatagaaatgctcatgaatagcacacctacgactaccatttacttggaaattaacccataacccagtatcggacttaatgaaaaaccacagaagcaattccattaaagccaggcacgtggcaatgacatctccaagcacaattcttaacactgttctggacacataaagcaacacagtcaggcaaaggaaggaatgtggaggtaacatgatcacactgcacagatgccatgattatagacacgagaaacaaatcaagaagatcaactggaaactactataagtagtaaaaggataaaagaacatggctaaggacaaaatcattacagagcaatcaacagctttcatatctacaaagaacagtgagaagataacatggaagaaaatacttcgtttctagcagcaacgaaagatgcaaaataacgataaacaaacctaacaagaaatatgcaaaatggatataaagaagacttggcatatcataaaagtaacatatcaaataaagagggaaagtagaccgggcagggtggctcacatctgtaatcccagcactttgggaggccgaggagggtggatcacaaggtcaggagatcgagaccatcctggctaacacggtgaaaccccatctctactaaaaaatacaaaaaattagccgggtgtggtggcaggtgcctgtagtcccagctacttgggaggctgatgcagaagaatggcatgaacctgggaggcggagcttgcagtgagccaagatc

SEQ ID NO: 77 - DNA, 3000 bp, human
cccgagcggcgagacggtccccgccatgtctgcggccatgagggagaggttcgaccggttcctgcacgagaagaactgcatgactgaccttctggccaagctcgaggccaaaaccggcgtgaacaggagcttcatcgctcttggtgtcatcggactggtggccttgtacctggtgttcggttatggagcctctctcctctgcaacctgataggatttggctacccagcctacatctcaattaaagctatagagagtcccaacaaagaagatgatacccagtggctgacctactgggtagtgtatggtgtgttcagcattgctgaattcttctctgatatcttcctgtcatggttccccttctactacatgctgaagtgtggcttcctgttgtggtgcatggccccgagcccttctaatggggctgaactgctctacaagcgcatcatccgtcctttcttcctgaagcacgagtcccagatggacagtgtggtcaaggaccttaaagacaaggccaaagagactgcagatgccatcactaaagaagcgaagaaagctaccgtgaatttactgggtgaagaaaagaagagcacctaaaccagactggatggaaacttcctgccctctctgtaccttcctactggagcttgatgttatattagggactgtggtataattattttaataatgttgccttggaaacatttttgagatattaaagattggaatgtgttgtaagtttctttgcttacttttactgtctatatatatagggagcactttaaacttaatgcagtgggcagtgtccacgtttttggaaaatgtattttgcctctgggtaggaaaagatgtatgttgctatcctgcaggaaatataaacttaaaataaaattatataccccacaggctgtgtactttactgggctctccctgcacgcattttctctgtagttacatttaggataatctttatggttctacttcctataatgtacaattttatataattctgaaatgtttttaatgtatttgtgcacatgtacatatggaaatgttactgtctgactacaacatgcatcatgctcatggggagggagcaggggaaggttgtatgtgtcatttataacttctgtacagtaagaccacctgccaaaagctggaggaaccattgtgctggtgtggtctactaaataatactttaggaaatacgtgattaatatgcaagtgaacaaagtgagaaatgaaatcgaatggagattggcctggttgtttccctagtatatggcatatgaataccaggatagctttataaagcagttagttagttactcactctagtgataaatcgggaaatttacacacacacacacacacacacacacacagagtaacctgtaactctcaattccctgaaaaactagtaatactgtcttatctgctataaactttacatatttgtctattgtcaagatgctacaatggaaaccatttctggttttatcttcaaagcggagaaacatgttgatttagtcttctttcccaatcttcttttttaaaccagtttaaggaacttctgaagatttgtccacctctgattacatgtatgttcttgtttgtatcattagcaacaacatgctaatgacgacacctagctctaagagcaattctgggagaatgaaaggaagtataaagtaacccataatctgcttggcaatagttaagtcaatctatcttcagtttttctctggcctttaaggtcaaacacaagaggcttccctagtttacaagtcagagtcacttgtagtccatttaaatgccctcatccgtattctttgtgttgataagctgcacatgactacatagtaagtacagaacagtaaagttaaaacggatgtctccattgatctgccaaatcgttatagagagcaatttgtctggactagaaaatctgagttttacaccatactgttaagagtccttttgaattaaactagactaaaacaagtgtataactaaactaacaagattaaatatccagccagtacagtattttttaaggcaaataaagatgattagctcaccttgagataacaatcaggtaagatcataacaatgtctcatgatgtaaaaaatattaaagatatcaatactaagtgacagtatcactctaatataatatggatcagagcatttattttggggaggaaaacagtggtgattaccggcattttattaaacttaaaactttgtagaaagcaaacaaaattgttcttgggagaaaatcaacttttagattaaaaaaattttaagtatctaggagtatttaaatccttttcccataaataaaagtacagttttcttggtggcagaatgaaaatcagcaacttctagcatatagactatataatcagattgacagcatatagaatatattatcagacaagatgaggaggtataaaagttactattgctcataatgacttacaggctaaaattagttttaaaatactatattaaattctgaatgcaatttttttttgttcccttgagaccaaaatttaagttaactgttgctggcagtctaagtgtaaatgttaacagcaggagaagttaagaattgagcagttctgttgcatgatttcccaaatgaaatactgccttggctagagtttgaaaaactaattgagcctgtgcctggctagaaaacaagcgtttatttgaatgtgaatagtgtttcaaaggtatgtagttacagaattcctaccaaacagcttaaattcttcaagaaagaattcctgcagcagttattcccttacctgaaggcttcaatcatttggatcaacaactgctactctcgggaagactcctctactcacagctgaagaaaatgagcacacccttcacactgttattacctatcctgaagatgtgatacactgaatggaaataaatagatgtaaataaaattgagttctcatttaacaaaaaaaaaaaaaaaaaaa

SEQ ID NO: 78 - DNA, 1876 bp, human
ggggggagaaattacagactctcagactgaggatagttatgacgaagccattaccagtgaaggcaatgtaactgcagaagatagtgaggatgaagatgaagacaaaatttggcccccatgtattagagtaattgtcattagatcacctgtgttgcagataggatcactctttatcattactgctgtaaaccctgctacaattggaagagaaaaggatatggaacatactctccgaatccctgaagttggtgtcagtaagtttcatgcagaaatttattttgaccatgacttacaaagttatgtccttgtggatcaaggcagtcaaaatggcacaattgttaatggaaaacagattcttcagccgaaaactaaatgtgacccttacgtacttgagcatggagatgaagtcaaaattggagaaactgtcttatcctttcacattcatcctggcagtgatacctgtgatggctgtgaaccagggcaggttagagcccaccttcgccttgataagaaagatgaatcttttgttggtccaacactaagtaaggaggaaaaagagttggaaagaagaaaagaattaaagaaaatacgagtaaaatatggtttacagaatacagaatacgaagatgaaaagacattgaagaatccaaaatataaagatagagctggaaaacgtagggagcaggttggaagtgaaggaactttccaaagagatgatgctcctgcatctgttcattctgaaattactgatagcaacaaaggtcggaagatgttggagaagatgggttggaagaaaggagagggcctggggaaggatggtggaggaatgaaaacgccgatccagcttcagcttcggcgaacacatgcaggcttggggacaggcaaaccatcctcatttgaagatgttcaccttctccaaaacaagaacaaaaaaaactgggacaaagcacgagagcggtttactgaaaacttcccagaaactaagcctcaaaaagatgacccagggaccatgccttgggtaaaagggactttagagtgaaggctaatcatagaaagaaaacctctagtttttttaaaaatagaatttggaaacttattttttctccccaaaagaatcagcagcacaggggaactatgtcacagtttacctcttcctgattcagaaatgtgtatggtttgcagcttttaaaaaccatttttttaaaactaataaatagtgactgaaccaatttatgcagtaaatagactaaagttcacagggcacggatgagtttatcaaacttcgttattttatcttcatttacaacatccatataagcaactagccatataagcaaaattcatagaactactaatgacttaagtgtacatctgttcttgtctccatatattcatgtaagatgcacaacaaaagaaacatcagaagtttataaaaataaatctgactatacgcatcctcatttattccctttagaacctaggtaaaaaatgttgcgaaaacatgggtagtggcgcatacattttgttatccttgaaatagcctaagtaatgttattgaagaactaatgaacaggtaacatattgtagaaaattagtctttcattgttttcttctgtgaagaatctgttgctatgtactgtatattcagcatttatatttggtttgtttcatagctaatgaggtatttagatatgaacaactgaatacatattgaaatagtgtgctggcttttgtagttttgataaagaccattgcaggcaatggaattgtgccagagaaatctgatttctagtacaaaaggaatacttagccagggcctcaagctcaagatacttattgaaaacatcctcaattgcaataaaaacattataacatg

SEQ ID NO: 79 - DNA, 1018 bp, human
gccaggcgaaggcggagcgctaacgtctaacgctaacggcggtcgtgccccgccgctgctgtcacccccggccgctgctgccctccccgccgaggttctactgctctccttcttaagaagggtgggaggcactcggtctctccccacacctctcgcctgaggccaggcgccaggtgtcgcctgaagccagacagccggtttgggagcgagcctgaggtcaaccaatcaatggctcagacagataagccaacatgcatcccgccggagctgccgaaaatgctgaaggagtttgccaaagccgccattcgggcgcagccgcaggacctcatccagtggggggccgattattttgaggccctgtcccgtggagagacgcctccggtgagagagcggtctgagcgagtcgctttgtgtaactgggcagagctaacacctgagctgttaaagatcctgcattctcaggttgctggcagactgatcatccgtgcagaggagctggcccagatgtggaaagtggtgaatctcccaacagatctgtttaatagtgtgatgaatgtgggtcgcttcacggaggagatcgagtggctgaagtttttagcccttgcttgcagcgctctgggagttactattaccaaaactctcaagatagtgtgtgaggtcttatcatgtgaccacaatggtgggttgccccgaatcccattcagcaccttccagtttctctacacgtatattgccgaagtggatggggagatctgtgcatcacatgtcagcaggatgctaaactacattgaacaggaagtaattggtcctgatggtttaatcacggtgaatgactttacccaaaaccccagggtttggctggagtaacagcacaattttggcaattttaaaggaagatacagaggtgattgtacttcagaatgataaacccatataccacctaaaatcaattttcttgtacaactggtacacactaataaacaaacatgtgagatcagaaaaaaaaaaaaaaaaaaaa

SEQ ID NO: 80 - DNA, 2757 bp, human
gccaccggtgtctccttctacatccgcctctgcgccggctgccacccgcgctccctccgccgccgccgccttgctgctgctcaaagctgctgccgccccttgggctaaaaggttttcaaatggaacattttgatgcatcacttagtacctatttcaaggcattgctaggccctcgagatactagagtaaaaggatggtttcttctggacaattatatacccacatttatctgctctgtcatatatttactaattgtatggctgggaccaaaatacatgaggaataaacagccattctcttgccgggggattttagtggtgtataaccttggactcacactgctgtctctgtatatgttctgtgagttagtaacaggagtatgggaaggcaaatacaacttcttctgtcagggcacacgcaccgcaggagaatcagatatgaagattatccgtgtcctctggtggtactacttctccaaactcatagaatttatggacactttcttcttcatcctgcgcaagaacaaccaccagatcacggtcctgcacgtctaccaccatgcctcgatgctgaacatctggtggtttgtgatgaactgggtcccctgcggccactcttattttggtgccacacttaatagcttcatccacgtcctcatgtactcttactatggtttgtcgtcagtcccttccatgcgtccatacctctggtggaagaagtacatcactcaggggcagctgcttcagtttgtgctgacaatcatccagaccagctgcggggtcatctggccgtgcacattccctcttggttggttgtatttccagattggatacatgatttccctgattgctctcttcacaaacttctacattcagacctacaacaagaaaggggcctcccgaaggaaagaccacctgaaggaccaccagaatgggtccatggctgctgtgaatggacacaccaacagcttttcacccctggaaaacaatgtgaagccaaggaagctgcggaaggattgaagtcaaagaattgaaaccctccaaaccacgtcatctgattgtaagcacaatatgagttgtgccccaatgctcgttaacagctgctgtaactagtctggcctacaatagtgtgattcatgtaggacttctttcatcaattcaaaacccctagaaaacgtatacagattatataagtagggataagatttctaacatttctgggctctctgacccctgcgctagactgtggaaagggagtattattatagtatacaacactgctgttgccttattagttataacatgataggtgctgaattgtgattcacaatttaaaaacactgtaatccaaacttttttttttaactgtagatcatgcatgtgattgtaaatgtaaatttgtacaatgttgttatggtagagaaacacacatgccttaaaatttaaaaagcagggcccaaagcttattagtttaaattagggtatgtttcaagtttgtattaatttgtaatagctctgtttagaaaaaatcaaagaccatgatttatgaaactaatgtgacataatttccagtgacttgttgatgtgaaatcagacacggcaccttcagttttgtactattggctttgaatcaagcaggctcaaatctagtggaacagtcagtttaactttttaacagatcttatttttttattttgagtgccactattaatgtaaaaaggggggggctctacagcagtcgtgatgaaacttaaatatatattctttgtcctcgagattttaggaagggtgtagggtgagtaggccatttttaatttctgaagtgctaagtgtttttatacagcaaacaaaaagtcaattttgctttccaccagtgcgagagaggatgtatacttttcaagagagatgattgcctatttaccgtttgacagagtcccgtagatgagcaatggggaactggttgccagggtctaaatttggattgatttatgcactgttatctgttttgacacagatttccttgtaaaatgtgcctagtttaccaaaattaacaaagggggggaaaggaccttagaactttttaaggtaaaatcaaatatagctacagcataagagaatcgagaaatttgatagaggtaacttgtttaatgtaaatctaatagtacttgtaatttctttctgcttaaatctaaagatgtgtttagaacctcttgtttaaaaataatagactgcttatcataaaatcacatctcacacatttgaggcagtggtcaaacaggtaaagcctatgatgtgtgtcattttaaagtgtcggaatttagcctctgaataccttctccattgggggaaagatattcttggaaccactcatgacatatcttagaaggtcattgacaatgtataaactaattgttggtttgatatttatgtaaatatcagtttaccatgctttaattttgcacattcgtactatagggagcctattggttctctattagtcttgtgggttttctgtttgaaaaggagtcatggcatctgtttacatttaccttatcaaacctagaatgtgtatatttataaatgtatgtcttcattgctaggtactaatttgcagatgtctttacatatttcaatacagaaactataacattcaatagtgtgctgtcaaagtgtgcttagctcacctggatatacctacattgttaaatgtctaaacagtaatcattaaaacatttttgattaaaaaaaaaaaaaaaaa

SEQ ID NO: 81 - DNA, 938 bp, human
  misc_feature (9)..(9): n is a, c, g, or t
  misc_feature (30)..(31): n is a, c, g, or t
  misc_feature (33)..(33): n is a, c, g, or t
ttatdawdnktgttcttaatgctttaaacnnanaakattytyaaaatatatakacgyctcttttctcatagaaatagattattttttwtaatacaaaaaaagaccaaaaaacaaaacaaaacaaaacatcaacagcaacargcccgttggaacatctttaagcgattactcagggcccggctgacagttacacgtgggttgcgtcagtcccgtgtacacacgcgttcagccatgtttaaaccgattgcatcaacttcgaaaccggcccgcccgccggcgcctggvgaggggcagagggagaagcagagagtttatcattcatctgtacacatagacgtttcttctttaaataacaccacgggcgggagccccatctgcatgtgcggttggtttggacaaaaatatagatatatatatataatasvrtattavvmttmccgacgggctccccgcgctgccaagtgccccagtgccaaagttttgccggcsccgccgcgggcgggggcgagggcgcgggcgcgggcgctccccggagtctcagccccggccggcagggggacgcgcgcgggggccgcgctagcagtggccggaggaggcgagcgggggctcgggcagctgcttgaacaagtgccgcaggtgctgagctcgcgcgacacksgckccacctkctkctgcagccgckcgtgckcggccgkgagcgccaggaccttgtgctgcgtctccaggkkgcgcatctgggcctkgtcgcggctctggcgcacggcgatgtkstgscsctcsccccgsatctkgtgctcskcgctgtgcttgtccacsgtctkctkggcctkgctctggayctgcgagsscsccsgcgcssccccgcstacaggcgggtcgggggcgcttggctgcacggggctccgcgtgccgggcggctggacgaggagactggagag

SEQ ID NO: 82 - DNA, 532 bp, human
gatgaaaactccagcctttcctgactcacctccatcttcggttcttcagttttctgagaagagttgggatatgtgggaaggggcatgggagctcggcagcctccgcctgccaggaaggcagtttcgcctctgcaggaaagagcagagcccgtgggaagccctgggtgagggtggcgcagccggcccagcacgcatggtattgccagccacggggggcctgcgtgtagtctctgctccctgcatttcaccttctttgttgactttccttctctgttttcccccatctgtttgccagaggggtgggactggcaacagaacagccgtggctgctttatctctcctctccacggtgtactcaggcctgagtggtgactcacgggagcctggccacctcgcagctgttcgccccctcaacctttgaactggaactgctggctcacacagggttttcgacaactgcagctgaatctcatggaaaagctggattcctctgccttacgcagaaacacccgggctccatctgccaggtgct

SEQ ID NO: 83 - DNA, 539 bp, human
  misc_feature (445)..(445): n is a, c, g, or t
  misc_feature (450)..(450): n is a, c, g, or t
  misc_feature (466)..(466): n is a, c, g, or t
  misc_feature (477)..(477): n is a, c, g, or t
  misc_feature (493)..(493): n is a, c, g, or t
  misc_feature (508)..(508): n is a, c, g, or t
  misc_feature (527)..(527): n is a, c, g, or t
  misc_feature (533)..(533): n is a, c, g, or t
atatcaaacacatttattcttaaagtgagaagctcatcaaggatagctagaggagagtgaaatatttacagtagaaaagtatggatgctagccaaacttcaaattctgtcactgcagagttattccgatagtacttttccaccatggcacatcacacatgttaaaattaactgcattcttgtaacacctctcaatggttgtgcacaataatagaagcaacattctgggactctttttcttaagatcctacagaatgaatttatgcacacacaaaaacaagtataatacaaaacattcaaaacaagtcacatccattttttttaaaaaaaagaaaacagcaagatggaaaatagggcaaggggatgggttgctactttctcatgtggcaaggtactgggattcttgccttgagaatcctagtgtcggggcctcacgtccagcatcncatcnaaaaagtggtggcagnaaatggggtcnccctcaatatggaggntgtgagttgtgtacnctggccacggtctccaagnttcacntttttg

SEQ ID NO: 84 - DNA, 3887 bp, human
gcaaacatactttaataagttaaagaaaataacaaaaacagtacagcaaagatactgggcaatgaaagaaagaaacatacaatttcaaaggtataacaaactgaggcattctgtaatatacattcaggctatttttaggggaaagaaagctagaagacatttaaaaatgatgcatatagccgcaactctcattcagaggagatttagaactctaatgatgagaagaagattcctctctctcaagaaaactgctattttgattcagagaaaatatcgggcacatctttgtacaaagcatcacttacagttccttcaggtacaaaatgcagttattaaaatccagtcatcatacagaagatggatgataaggaaaaggatgcgagagatgcacagggctgctactttcatccagtctactttcagaatgcacagattacatatgagatatcaggctttgaaacaggcctccgttgtgatccaacagcaataccaagcaaatagagctgcaaaactgcagaggcagcattatctcagacaaagacactctgctgtgatccttcaggctgcattcaggggtatgaaaactagaagacatttgaagagtatgcattcctctgcaacccttattcagagtaggtttagatcattactggtgaggagaagattcatttccctcaaaaaagctactatttttgttcagaggaaatatcgagccaccatttgtgccaaacataaattgtaccaattcttgcacttaagaaaggcagccattacaatacagtcatcttacagaagactgatggtaaagaagaagttacaagaaatgcaaagggctgcagttctcattcaggctactttcaggatgcacagaaaaaaaaatatattacatttcagacttggaaacatgcttcaattctaattcagcaacattatcgaacatatagagctgcaaaattgcaaagagaaaattatatcagacaatggcattctgctgtggttattcaggctgcatataaaggaatgaaagcaagacaacttttaagggaaaaacacaaagcttctattgtaatacaaggcacctacagaatgtataggcagtattgtttctaccaaaagcttcagtgggctacaaaaatcatacaagaaaaatatagagcaaataaaaagaaacagaaagtatttcaacacaatgaacttaagaaagagacttgtgttcaggcaggttttcaggacatgaacataaaaaaacagattcaggaacagcaccaggctgccattattattcagaagcattgtaaagcctttaaaataaggaagcattatctccacattagagcaacagtagtttctattcaaagaagatacagaaaactaactgcagtgcgtacccaagcagttatttgtatacagtcttattacagaggctttaaagtacgaaaggatattcaaaatatgcaccgggctgccacactaattcagtcattctatcgaatgcacagggccaaagttgattatgaaacaaagaaaactgcaattgtggttatacagaattattataggttgtatgttagagtaaaaacagaaagaaaaaactttttagcagttcagaaatctgtacgaactattcaggctgcttttagaggcatgaaagttagacaaaaattgaaaaatgtatcagaggaaaagatggcagccattgttaaccaatctgcactctgctgttacagaagtaaaactcagtatgaagctgttcaaagtgaaggtgttatgattcaagagtggtataaagcttctggccttgcttgttcacaggaagcagagtatcattctcaaagtagggctgcagtaacaattcaaaaagctttttgtagaatggtcacaagaaaactggaaacacagaaatgtgctgccctacggattcagttcttccttcagatggctgtgtatcggagaagatttgttcagcagaaaagagctgctatcactttacagcattattttaggacgtggcaaaccagaaaacagtttttactatatagaaaagcagcagtggttttacaaaatcactacagagcatttctgtctgcaaaacatcaaagacaagtctatttacagatcagaagcagtgttatcattattcaagctagaagtaaaggatttatacagaaacggaagtttcaggaaattaaaaatagcaccataaaaattcaggctatgtggaggagatatagagccaagaaatatttatgtaaagtgaaagctgcctgcaagattcaagcctggtatagatgttggagagcacacaaagaatatctagctatattaaaagctgttaaaattattcaaggttgcttctataccaaactagagagaacacggtttttgaatgtgagagcatcagcaattatcattcagagaaaatggagagctatacttcctgcaaagatagctcatgaacacttcttaatgataaaaagacatcgagctgcttgtttgatccaagcacattatagaggatataaaggaaggcaggtctttcttcggcagaaatctgctgctttgatcatacaaaaatatatacgagccagggaggctggaaagcatgaaaggataaaatatattgaatttaaaaaatctacagttatcctacaagcactggtgcgtggttggctagtacgaaaaagatttttagaacagagagccaaaattcgacttcttcacttcactgcagctgcatattatcacctgaatgctgttagaattcaaagagcctataaactttacctggctgtgaagaatgctaacaagcaggttaattcagtcatctgtattcagagatggtttcgagcaagattacaagaaaagagatttattcagaaatatcatagcatcaaaaagattgagcatgaaggtcaagaatgtctgagccagcgaaatagggctgcatcagtaatacagaaagcagtgcgccattttctcctccgtaaaaagcaggaaaaattcactagtggaatcattaaaattcaggcattatggagaggctattcttggaggaagaaaaatgattgtacaaaaattaaagctatacgactaagtcttcaagttgttaatagggagattcgagaagaaaacaaactctacaaaagaactgcacttgcacttcattaccttttgacatataagcacctttctgccattcttgaggccttaaaacacctagaggtagttactagattgtctccactttgttgtgagaacatggcccagagtggagcaatttctaaaatatttgttttgatccgaagttgtaatcgcagtattccttgtatggaagtcatcagatatgctgtgcaagtcttgcttaatgtatctaagtatgagaaaactacttcagcagtttatgatgtagaaaattgtatagatatactattggagcttttgcagatataccgagaaaagcctggtaataaagttgcagacaaaggcggaagcatttttacaaaaacttgttgtttgttggctattttactgaagacaacaaatagagcctctgatgtacgaagtaggtccaaagttgttgaccgtatttacagtctctacaaacttacagctcataaacataaaatgaatactgaaagaatactttacaagcaaaagaagaattcttctataagcattccttttatcccagaaacacctgtaaggaccagaatagtttcaagacttaagccagattgggttttgagaagagataacatggaagaaatcacaaatcccctgcaagctattcaaatggtgatggatacgcttggcattccttattagtaaatgtaaacattttcagtatgtatagtgtaaagaaatattaaagccaatcatgagtacgt

SEQ ID NO: 85 - DNA, 1947 bp, human
ggcacgaggccaagagctacgcggcggcggcggagcgcaggcctcgtgccgttacggccatcacggcggccgcagtggcgtcctggagccctcctcagtgctgaagctgctgaaagatggcagaagaagtggtggtagtagccaaatttgattatgtggcccaacaagaacaagagttggacatcaagaagaatgagagattatggcttctggatgattctaagtcctggtggcgagttcgaaattccatgaataaaacaggttttgtgccttctaactatgtggaaaggaaaaacagtgctcggaaagcatctattgtgaaaaacctaaaggataccttaggcattggaaaagtgaaaagaaaacctagtgtgccagattctgcatctcctgctgatgatagttttgttgacccaggggaacgtctctatgacctcaacatgcccgcttatgtgaaatttaactacatggctgagagagaggatgaattatcattgataaaggggacaaaggtgatcgtcatggagaaatgcagtgatgggtggtggcgtggtagctacaatggacaagttggatggttcccttcaaactatgtaactgaagaaggtgacagtcctttgggtgaccatgtgggttctctgtcagagaaattagcagcagtcgtcaataacctaaatactgggcaagtgttgcatgtggtacaggctctttacccattcagctcatctaatgatgaagaacttaatttcgagaaaggagatgtaatggatgttattgaaaaacctgaaaatgacccagagtggtggaaatgcaggaagatcaatggtatggttggtctagtaccaaaaaactatgttaccgttatgcagaataatccattaacttcaggtttggaaccatcacctccacagtgtgattacattaggccttcactcactggaaagtttgctggcaatccttggtattatggcaaagtcaccaggcatcaagcagaaatggcattaaatgaaagaggacatgaaggggatttcctcattcgtgatagtgaatcttcgccaaatgatttctcagtatcactaaaagcacaagggaaaaacaagcattttaaagtccaactaaaagagactgtctactgcattgggcagcgtaaattcagcaccatggaagaacttgtagaacattacaaaaaggcaccaatttttacaagtgaacaaggagaaaaattatatcttgtcaagcatttatcatgatactgctgaccagaagtgactgctgtgtagctgtaatttgtcatgtaattgaagactgagaaaatgttgggtccagtcgtgcttgattggaaattgttgtttctaaatctatatgagaattgacaataagtatttttattataactcagcccatacatatatactatgtatgcagtgcatctgcatagaacagttccttatccttggccttctgttttattgtttttttctttgctgttttccctttgcttctaatattacagttttgtattttgtaaacaaaaatcaaataatgcatatcagaatctttatatggaagaaatcctttattgcctttcctttgtttccttgtaaaggcaccctgttctgttatggtttttcattatataaaattattatatctatatatgacatatgctaaaatttcttggagagtgttaatcttttctgtgactaaatagcaataataagtggaaaattagaaattatttccaggtattatatttgtcacaggccattgtaaataccaagtatattgtgtctgccataatttttaaaaatacattcattgtcttcagtcatacagcaagacacatgagacatagattagaaaacatgttgtacaattttaatttacaactgttggaaataaaaatcacttaatttttttccaaaaaaaaaaaaaaaaaaaaaaaaa

SEQ ID NO: 86 - DNA, 549 bp, human
  misc_feature (450)..(450): n is a, c, g, or t
  misc_feature (468)..(468): n is a, c, g, or t
  misc_feature (508)..(508): n is a, c, g, or t
ttttcatggcaataggaactgaagtacttcaaataatgtgagcttaaacatgttacttcattgaaacaaccaaaactacttgatgttacatctaaaatcctggttaaaataaattttagatttggaaagggaattgcaaaactaacattctttgtagcaaaatgtcccttagtaatagtcaagttgacctcatttcagtagttcataaaggaaaatccaaagccctcagcagtgaattacctggccacatagctgattttggtcactgtgaatgcagaccaatcacctagtactggaagctcacagtggtagacatcactatcacagtactttacggtcatggatttctcgtgaactatttcaggaacaatcacaaagatgacattcttcactgtatttgcatttgtaaccaccaagcaagtaaggatctctgccccagatgcatggttngaggtaaggttcacaggnaccactaaaggggcagagccaagtaaaacatggatgtctncagtggacagtgtaggatttcttgataagcaaagcacctaa

SEQ ID NO: 87 - DNA, 2572 bp, human
gcttccggctttcgctcgcttccatatccgctcctctagtcgccctccgctggccccgccttcgtccccggaagattgggtcctctggcgagccactgtttgccgtttgatcgggcaccaaataaagtttctttattcaaaagcactttttttttaaagccacaccacccccattctcagctcctccttcgcggcggtaccgcctctgtttctgcggcgattgaacagccgagctttgcggccgggatcgcggaaagtgatggctgtcgtcccggcgtctctctcaggacaggacgtgggatcatttgcatatcttacaattaaagacagaataccacagatcttaactaaggttattgatacattgcatcgacataaaagtgaattttttgagaaacacggagaggaaggcgtggaagctgaaaagaaagctatctctctcctttctaaattacggaatgaattgcaaacagataaaccatttatccccttggttgagaaatttgttgatactgatatatggaatcagtacctagaatatcaacagagtcttttaaatgaaagtgatggaaaatcaagatggttctactcaccgtggttgttggtagaatgttacatgtatcgaagaattcatgaagcaattatccagagtccaccaatcgattactttgatgtatttaaagaatcaaaagagcaaaatttctatgggtcacaggaatccatcattgctttatgtactcacctgcaacaattgataagaactattgaagacctagatgaaaatcagctgaaagatgagttttttaaacttctgcagatttcactgtggggaaataagtgtgatctgtctctctcaggtggagaaagtagttctcagaataccaatgtactaaattcattggaagacctaaaacctttcattttattgaatgatatggaacatctttggtcattgcttagcaattgcaagaaaacaagagaaaaagcttctgctactagagtgtatattgttctcgataattctggatttgagcttgttacagatttaatattagccgacttcttgttgtcctctgaactggctactgaggttcatttttatggaaaaacaattccatggtttgtttctgatactactatacatgattttaattggttaattgaacaggtaaaacacagtaatcataagtggatgtccaagtgtggggctgactgggaagagtatattaaaatgggtaaatgggtttaccacaatcatatattttggactctgcctcatgagtactgtgcaatgcctcaggttgcacctgacttatatgctgaactacagaaggcacatttaattttattcaagggtgatttgaattacaggaagttgacaggtgacagaaaatgggagttttctgttccatttcatcaggctctgaatggcttccatcctgcaccactctgtaccataagaacattaaaagctgaaattcaggttggtctgcagcctgggcaaggggaacagctcctggcctctgagcccagctggtggaccactggaaaatatggaatatttcagtacgatggtcccctttgacttgatttaggagctctcagttgcatagaaagatctggtgagcaccttttcatccccagaaaaggagcacgtgaattgagtcgcctggcggctctgtacgcgctcagggaagcttagcttcttggtgcccatctacgtgcactggatgatttttcttttgaacattttgccccactacactgttttggggatagctgggttaagcaagttaaagatatttacatttatattggaattttagcaactttttttcaggttaaatatataatttcaagtgcttttaatgaacttatttttaattggctagggagcaaaaaataagtgagttctgcttttagttagttaaccttgttcttttcttaaatagtacactgcatggtatttaatattccaggaagcatgggattttattttgcttgattttgggcacatgaaataatagctctaggaaaatgcgcatcttaatgactctttgtaaagagaggcatttcttacaactgtgatgtttgcttacataaaagttacctcataagttaattctaacttttattcttgaattttatttcatttcaatagcttgtttcatttgcacgcctttgtattttgattgacctgtagaatggatgttaggaaactcaaaattgaacacagtgaaacaaatggtatttgaagaaatgtaatatcttttatattctatttatgatatccataatcaaatgagattattttaccacataaatgttttaaatatcagatttttagtttgcagttttaggaaaatgctttagatagaaaaggttcttatgcattgaatttggagtactaccaacaatgaatgaatttattttttatattcttacacattttattggtcattgtcacagatagtaaatactaaaaatttcaggtcagtttgttttgaaactgaaattggaaataaatctggaaatgttttgttgcactaaaataataaaatgaattgtactg

SEQ ID NO: 88 - DNA, 2366 bp, human
gaccacgcgtatcgatgtcgacccacaggattgtcacagagggcagggtggtgactgaggaccagctcctcatgcttgaggctgtggtgatgcacctcgggatccgctctgcccgctgtgtcctgggcatggagggtcagcaggtcatcctgcacctgcccctatcccagaaggggcccttctggacatgggagcctagtgcccctcgaactctgctccaggtcctacaggatccagccctgaaagacctcgtcctcacctgccccaccctgccctggcattccctgatcctgcggccccagtatgagatccaagccatcatgcacatgcgcaggaccattgtcaagatcccttctaccctggaggtcgacgtggaggacgtcaccgcctcctcccggcacgtccactttatcaaaccgctgctgctgagcgaggtcctggcctgggaaggccctttccccctgtccatggagatcctggaggttcctgagggccgccccatcttcctcagcccgtgggtgggctccttgcaaaaaggccagaggctttgcgtctatggcctagcctcaccaccctggcgggtcctggcctcaagcaagggccgcaaggtgcccaggcacttcctggtgtcagggggctaccaaggcaagctgcggcggcggccaagggagttccccacggcctatgacctcctaggtgctttccagccaggccggccactccgggtggtggccacaaaggactgtgagggcgagagggaggagaatcccgagttcacgtccctggctgtgggtgaccggctggaggtgctggggcctggccaggcccatggggcccagggcagtgacgtggatgtcttggtttgtcagcggctgagtgaccaggctggggaagatgaggaggaagagtgcaaagaggaggcagagacccagagcgggtcctgctgcccttccacttccctggcagtttcgtggaggagatgagtgacagccggcgctacagcctggcagatctgactgcccagttttcaatgccttgtgaggtcaaggtggtggccaaggacaccagccaccccaatgaccctcagaacctccttcctgggcctgcggctggaggagaagatcacagagccattcttggtggtgagcctggactctgagctgggatgtgctttgagatccctccccggaggctggacctgactgtcgtggaggccaaggggcagccagacttgccagaggggtctctccccatagccacagtggaggaagctggaacagacaccttttattattgtcttcggaagttaccagcctgtgagatccaagcccccccacccaggccccctaaaaatcagggcctcagcaagcagaggagacacagcagtgagggaggcgtcaagtcttctcaagtcttaggattgcagcaacacgttcggctgcccaaacccaaggcgaagaccttgccagagttcatcaaggatggctccagtacgtacagcaagattcctgcccacaggaagggccacaggcccgctaagccccaaaggcaggatctagatgatgatgaacatgattatgaagaaatacttgagcaatttcagaaaaccatctaagtgctggaggaaccacgcttcctaactgctgcttctcagggaatccgacaccagccaaccattttaagcctctaaaagacctcgggcaagtctcacagaaactgagctgcagacggggagtagctttgtggaaactgatttgatggacactgcaccagcttccttcaggttctagattcttgctacttagggcgggctggtttggacctaacatctcgcacgtgactccctcagcctcagagccttgggatgcagagcagctggcagggttcctctcaatcctgcaaccccagctgtcccaccggtggatgcagaggggaatccgaggccatcaaccttggtgacagcagcgcagtgccaatgctgatcacactgcatgggagattttgttaacgtctgccacccccactctcacccccaagctctaagcccccgggaggcctggactgtcttcctcatctctgtagcaccaagcctgatagatctgtatatggtaaacaggggtttaaccacatgtggttaacatggattaatgtgggaatttggcttcaagaacacaaccttaggaccttgggccccaaaagctggtggtgaaatgagaggagccaatttaagaagacccttatggagacctgaggctgcagaaactggtaggtttcatcaggtggttaaagtcgtcaaagttgtaagtgactaaccaagattatttcattttaaaaccacagaataaaaatgacacctgagcttctcc

SEQ ID NO: 89 - DNA, 1304 bp, human
gcggccgcagcagcagcagcaagacggactcgtggagacgcgccgccgccgccgccgccgggccgggccgggtgtcgcgcgccgagggcgcaccaccggcccgtttcgcccgccgccgccgccgccgaggtgactgaggagagaggcgcctcctcgctcccgccaccgccggacttcaatgcccagtccccagctcgccagcgtttttcgttggaatatacgttgcacatttatggcgattctgagtgtgagggcagacttctgccaggctcagcacagcattttcgctgacaagtgagcttggaggttctatgtgccataattaacattgccttgaagactcctggacaccgagactggcctcagaaatagttggcttttttttttttttaattgcaagcatatttcttttaatgactccagtaaaattaagcatcaagtaaacaagtggaaagtgacctacacttttaacttgtctcactagtgcctaaatgtagtaaaggctgcttaagttttgtatgtagttggattttttggagtccgaaggtatccatctgcagaaattgaggcccaaattgaatttggattcaagtggattctaaatactttgcttatcttgaagagagaagcttcataaggaataaacaagttgaatagagaaaacactgattgataataggcattttagtggtctttttaatgttttctgctgtgaaacatttcaagatttattgatttttttttttcactttccccatcacactcacacgcacgctcacactttttatttgccataatgaaccgtccagcccctgtggagatctcctatgagaacatgcgttttctgataactcacaaccctaccaatgctactctcaacaagttcacagaggaacttaagaagtatggagtgacgactttggttcgagtttgtgatgctacatatgataaagctccagttgaaaaagaaggaatccacgttctaaaaaagaaggggagcgttcaattccaaacagctgctttatttggagaaataccgacctaagatgcgattacgcttcagagataccaatgggcattgctgtgttcagtagaaggaaatgtaaacgaaggctgacttgattgtgccatttagagggaactcttggtacctggaaatgtgaatctggaatattacctgtgtcatcaaagtagtgatggattcagtactcctcaaccactctcctaatgattggaacaaaagcaaacaaaaaagaaatctctctataaaatgaataaaatgtttaagaaaagagaaaaaaaaa

SEQ ID NO: 90 - DNA, 2872 bp, human
tccaggaatcgatagtgcattcgtgcgcgcggccgcccgtcgcttcgcacagggctggatggttgtattgggcagggtggctccaggatgttaggaactgtgaagatggaagggcatgaaaccagcgactggaacagctactacgcagacacgcaggaggcctactcctcggtcccggtcagcaacatgaactcaggcctgggctccatgaactccatgaacacctacatgaccatgaacaccatgactacgagcggcaacatgaccccggcgtccttcaacatgtcctatgccaacccggccttaggggccggcctgagtcccggcgcagtagccggcatgccggggggctcggcgggcgccatgaacagcatgactgcggccggcgtgacggccatgggtacggcgctgagcccgagcggcatgggcgccatgggtgcgcagcaggcggcctccatgatgaatggcctgggcccctacgcggccgccatgaacccgtgcatgagccccatggcgtacgcgccgtccaacctgggccgcagccgcgcgggcggcggcggcgacgccaagacgttcaagcgcagttacccgcacgccaagccgccctactcgtacatctcgctcatcaccatggccatccagcgggcgcccagcaagatgctcacgctgagcgagatctaccagtggatcatggacctcttcccctattaccggcagaaccagcagcgctggcagaactccatccgccactcgctgtccttcaatgactgcttcgtcaaggtggcacgctccccggacaagccgggcaagggctcctactggacgctgcacccggactccggcaacatgttcgagaacggctgctacttgcgccgccagaagcgcttcaagtgcgagaagcagccgggggccggcggcgggggcgggagcggaagcgggggcagcggcgccaagggcggccctgagagccgcaaggacccctctggcgcctctaaccccagcgccgactcgcccctccatcggggtgtgcacgggaagaccggccagctagagggcgcgccggccccgggcccggccgccagcccccagactctggaccacagtggggcgacggcgacagggggcgcctcggagttgaagactccagcctcctcaactgcgccccccataagctccgggcccggggcgctggcctctgtgcccgcctctcacccggcacacggcttggcaccccacgagtcccagctgcacctgaaaggggacccccactactccttcaaccacccgttctccatcaacaacctcatgtcctcctcggagcagcagcataagctggacttcaaggcatacgaacaggcactgcaatactcgccttacggctctacgttgcccgccagcctgcctctaggcagcgcctcggtgaccaccaggagccccatcgagccctcagccctggagccggcgtactaccaaggtgtgtattccagacccgtcctaaacacttcctagctcccgggactggggggtttgtctggcatagccatgctggtagcaagagagaaaaaatcaacagcaaacaaaaccacacaaaccaaaccgtcaacagcataataaaatccaacaactatttttatttcatttttcatgcacaaccttgcccccagtgcaaaagactgttactttattattgtattcaaaattcattgtgtatattactacaaagacggccccaaaccaatttttttcctgcgaagtttaatgatccacaagtgtatatatgaaattctcctccttccttgcccccctctctttcttccctcttggccctccagacattctagtttgtggagggttatttaaaaaacaaaaaggaagatggtcaagtttgtaaaatatttgtttgtgcttttcccccctccttacctgaccccctacgagtttacaggcttgtggcaatactcttaaccataagaattgaaatggtgaagaaacaagtatacactagaggctcttaaaagtattgaaaagacaatactgctgttatatagcaagacataaacagattataaacatcagagccatttgcttctcagtttacatttctgatacatgcagatagcagatgtctttaaatgaaatacatgtatattgtgtatggacttaattatgcacatgctcagatgtgtagacatcctccgtatatttacataacatatagaggtaatagataggtgatatacgtgatacgttctcaagagttgcttgaccgaaagttacaaggaccccaacccctttgctctctacccacagatggccctgggaacaatcctcaggaattgccctcaagaactcgcttctttgctttgagagtgccatggtcatgtcattctgaggtacataacacataaattagtttctatgagtgtataccatttaaagattttttcagtaaagggaatattacatgttgggaggaggagataagttatagggagctggatttcaaacggtggtccaagattcaaaaatcctattgatagtggccattttaatcattgccatcgtgtgcttgtttcatccagtgttatgcactttccacagttggtgttagtatagccagagggtttcattattatttctctttgctttctcaatgttaatttattgcatggtttattctttttctttacagctgaaattgctttaaatgatggttaaaattacaaattaaattgggaatttttatcaatgtgattgtaattaaaaatattttgatttaaataacaaaaataataccagattttaagccgcggaaaatgttcttgatcatttgcagttaaggactttaaataaatcaaatgttaacaaaaaa

SEQ ID NO: 91 - DNA, 3998 bp, human
ccgggagcccgggcgccctggagtgaggaggaccgggagctggctctggaggctgcggaggcgacgccggagagaacgaagcctcggctgggagcggatctttcgaagatggtttggctgccttggagatttggagatctgatgccacgatgaggactcacacacggggggctcccagtgtgtttttcatatatttgctttgctttgtgtcagcctacatcaccgacgagaacccagaagttatgattcccttcaccaatgccaactacgacagccatcccatgctgtacttctccagggcagaagtggcggagctgcagctcagggctgccagctcgcacgagcacattgcagcccgcctcacggaggctgtgcacacgatgctgtccagccccttggaatacctccctccctgggatcccaaggactacagtgcccgctggaatgaaatttttggaaacaacttgggtgccttggcaatgttctgtgtgctgtatcctgagaacattgaagcccgagacatggccaaagactacatggagaggatggcagcgcagcctagttggttggtgaaagatgctccttgggatgaggtcccgcttgctcactccctggttggttttgccactgcttatgacttcttgtacaactacctgagcaagacacaacaggagaagtttcttgaagtgattgccaatgcctcagggtatatgtatgaaacttcatacaggagaggatggggatttcaatacctgcacaatcatcagcccaccaactgtatggctttgctcacgggaagcctagtcctgatgaatcaaggatatcttcaagaagcctacttatggaccaaacaagttctgaccatcatggagaaatctctggtcttgctcagggaggtgacggatggctccctctatgaaggagttgcgtatggcagctacaccactagatcactcttccaatacatgtttctcgtccagaggcacttcaacatcaaccactttggccatccgtggcttaaacaacactttgcatttatgtatagaaccatcctgccagggtttcaaaggactgtggctattgcggactcaaattacaactggttttatggtccagaaagccaattagtgttccttgataaatttgtcatgcgtaatggcagtggtaactggctagctgaccaaatcagaaggaaccgtgtggtggaaggtccaggaacaccatccaaagggcagcgctggtgcactctgcacacagaatttctctggtatgatggcagcttgaaatcggttcctcctccagactttggcacccctacactgcattattttgaagactggggtgtcgtgacttatggaagtgcactacctgcagaaatcaatagatctttcctttccttcaagtctggaaaactggggggacgtgcaatatatgacattgtccacagaaacaaatacaaagattggatcaaaggatggagaaattttaatgcagggcatgaacatcctgatcaaaactcatttacttttgctcccaatggtgtgcctttcattactgaggctctgtacgggccaaagtacaccttcttcaacaatgttttgatgttttccccagctgtgtcaaagagctgcttttctccctgggtgggtcaggtcacagaagactgctcatcaaaatggtctaaatacaagcatgacctggcagctagttgtcaggggagggtggttgcagcagaggagaaaaatggggtggttttcatccgaggagaaggtgtgggagcttataacccccagctcaacctgaagaatgttcagaggaatctcatcctcctacatccacagctgcttctccttgtagaccaaatacacctgggagaggagagtcccttggagacagcagcgagcttcttccataatgtggatgttccttttgaggagactgtggtagatggtgtccatggggctttcatcaggcagagagatggtctctataaaatgtactggatggacgatactggctacagcgagaaagcaacctttgcctcagtgacatatcctcggggctatccctacaacgggacaaactatgtgaatgtcaccatgcacctccgaagtcccatcaccagggcagcttacctcttcatagggccatctatagatgttcagagcttcactgtccacggagactctcagcaactggatgtgttcatagccaccagcaaacatgcctacgccacatacctgtggacaggtgaggccacaggacagtctgcctttgcacaggtcattgctgatcgtcacaaaattctgtttgaccggaattcagccatcaagagcagcattgtccctgaggtgaaggactatgctgctattgtggaacagaacttgcagcattttaaaccagtgtttcagctgctggagaagcagatactgtcccgagtccggaacacagctagctttaggaagactgctgaacgcctgctgagattttcagataagagacagactgaggaggccattgacaggatttttgccatatcacagcaacagcagcagcaaagcaagtcaaagaaaaaccgaagggcaggcaaacgctataaatttgtggatgctgtccctgatatttttgcacagattgaagtcaatgagaaaaagattagacagaaagctcagattttggcacagaaagaactacccatagatgaagatgaagaaatgaaagaccttttagattttgcagatgtaacatacgagaaacataaaaatgggggcttgattaaaggccggtttggacaggcacggatggtgacaactacacacagcagggccccatcactgtctgcttcctataccaggttgttcctgattctgaacattgctattttctttgtcatgttggcaatgcaactgacttatttccagagggcccagagcctacatggccaaagatgtctttatgcagttcttctcatagatagctgtattttattatggttgtactcttcttgttcccaatcacagtgttagcactgaagctataaattacctggtcattttgtgatcacaagagtctatgcaaaaaaaaaaatttctttaccccagattatcagatttttttccctcagattcattttaacaaattaagggaagatattttgacacaagaaagcaggaacgtggagaaattggagcaggaaaagaaattatcaaagcaatagaaatagcttggtggtcctatggtgtttttggaagtatttggcattgctaattgagcagtccatatagtactacttttagaagaaacaaaaagtctattttttaaagtaatgttttttcttatgagaaaaaggtttagatagaattgggttttattaatattaatttaatgctattagcaatttccatatactatattgtggaaaagactgaagaatacaattctgagaaatataaaaaaattttaatggtatactcatgttgaaagataaatgttgctaagtcctggtatgatggtgtgagcttccttggggaagtacttcttgagttatgtaactaacaggatgttttactacagatctggatggctattcagataacatggcaaaaaatgatagcagaagatcattaaaaacttaaaatatattttattagaaaacatttatctatgaatgaatatttccttgatgctggtctctgcacacatatgcttggttacttgcatgcattcattggttgttcaataagtgagatgattacagataatactgtattttccttatatggaaaaccgttatagacccaataacaactaaacctttcaaaagaaaatattttctattatgaatgttgattttcataccaaagaagatggagagtctaaaatttggatatgattcttatgtttttttaatagaaaaccttcttcaagtttattttcctaaataaacatcataattgtgaaaaaaaaaaaaaaaaaaaaaaaaaaaaaaaaaaaaaaaa

SEQ ID NO: 92 - DNA, 764 bp, human
tttttttttttttttaagtgagacaacatatgggactttattaaataaggtgaattggggacaaatgaaaggtgagatgaaggcaaactactgtcaagggatgatctgagcctgaacaactcagtgaatgtgaagagaaaacaagattactgtgaatatagatgtaactgggaaaagcaaggagaaaaaaagggagcacaaggaagaaaaaaaatatcaacaattggtgagccatctcaagccatcaaaaaaacttcattctatggtaggagggaagctggaacacaagggcagagtaattgtggtgttacgaattaaagtcactagctccagttgaggcatataaatgacaattagaagggacagaagttagggttatgtcagcagcctccagtgagctaggatataaactaagtcttttcaagctgaacaaattatatacactattcaacccatttaagtgaagagacactatttaagtccacaaaagcaaacttaactacctactatataacttacttttcatggaaagtatctggcatccatgagggaggcttctcggggtttaaccacatatttcaaggttacacagtgaaattatgtctttacatgcaagtagtgtgaataattttctccacctgggaacactaattataaaaagatgactcccacatgggcttaagggtctgtaatgaaaagctaaatgtccagtacaatttctccccaaaaacccaaatgggtagtaactgagtcccaaggccaat

SEQ ID NO: 93 - DNA, 422 bp, human
gggggggggggggtcaggaaggacgttggtgttgaggttagcatacgtatcaaggacagtaactaccatggctcccgaagttttgccaaaacctcggatgcgtggccttctggccaggcgtctgcgaaatcatatggctgtagcattcgtgctatccctgggggttgcagctttgtataagtttcgtgtggctgatcaaagaaagaaggcatacgcagatttctacagaaactacgatgtcatgaaagattttgaggagatgaggaaggctggtatctttcagagtgtaaagtaatcttggaatataaagaatttcttcaggttgaattacctagaagtttgtcactgacttgtgttcctgaactatgccacatgaatatgtgggctaagaatagttcctcttgataaataaacaattaaca

SEQ ID NO: 94 - DNA, 711 bp, human
  misc_feature (529)..(529): n is a, c, g, or t
  misc_feature (592)..(592): n is a, c, g, or t
  misc_feature (672)..(672): n is a, c, g, or t
  misc_feature (678)..(678): n is a, c, g, or t
  misc_feature (680)..(680): n is a, c, g, or t
gaggctggagaatttaattcctaatggatgacctccaggagggggacatttgccagagctctcccatcatcccagatgggggcctgggtggggctttgctgattgtcacagttgaggtgccaggactgagttttgggggaccccagttgtccacccctggccaggacagagaggcaggtgcagatacagctggaggagcagcaggagagaggcaggtgggcttgcaaaagattgaggcagaatggtggtcacctttggcccatctgcctaccccaccctcagggccccaggcccccttcctccagcccccgatggccctggggactaggagacaggctgttgggcgccagggcctcccgatcaggtccccaggagccaccaccaccagggtctacagtctctaggcgcaaggcgggcaacaggcccaggcttcgaggcacagctggtgggaaggcccaggggccaggcaacccagagggcccctcttcactactgccccggctgctgccattactgctcctgtcaggangccactcggacaggcggcggctcttgggtgaggggctacggctggcaccacggcgttcacggnatgagggccgtagggcaagccccaggaacctgccagtcccgggctgcggctgcgtgtcgcttggactttgccagactggngctgcngnaccttggtgcaaggagctccagtgtgctgtc

SEQ ID NO: 95 - DNA, 3043 bp, human
ttttgaaaacacgctccgggagctagagcctgaggtcggcggcgcacgctgttgccccgtgggcttctgctccctcgcttgtcttctcgggcttctcgccccggccgcggccgggtcctcagtagtcgagaatgactaaaaaaagaaaacgccaacatgattttcaaaaagtgaaattgaaagttggtaaaaagaagcccaagttacaaaatgctactcctacaaactttaaaacaaagactatacatctgcctgagcaactcaaagaggatggaacacttccaacaaacaatagaaaacttaacataaaggatttgctgtcacagatgcatcactacaatgctggggttaaacaaagtgctcttcttggacttaaagaccttttgtctcaatacccatttataattgatgcacacctttcaaacatattaagtgaagtgactgctgtgtttacagataaagatgctaatgtacgattagcagcagttcaacttcttcaattcctggcccccaaaatacgagctgaacaaatttctccattttttcctttggtaagtgcccatctctctagtgccatgactcacattactgaaggaattcaggaggactctttaaaagttttggacattctgctggaacagtacccagctctaattactggccgtagcagcatattgcttaagaattttgtagaacttatttctcatcagcagctgtccaaaggactgataaatagagacagatcccagtcctggatactttctgtaaatcctaatcggagactcacttctcagcaatggaggctgaaagtcttagtgagactcagtaaattccttcaggccttggcagatggatccagtaggttgagagaaagtgaaggacttcaggaacagaaagaaaatccccatgccactagcaactccatttttatcaactggaaggaacatgccaacgaccagcaacacatccaggtttatgaaaatgggggttcacagccaaatgtcagttcacagttcaggctacggtatctggttggaggactgagtggtgtggatgaaggcctgtcatctactgaaaacctgaaaggatttattgagataataattccattgctaattgaatgctgggttgaagctgtacctccacaactagctactcctgttgggaatggtatagaacgagaacctctacaggttatgcagcaagttcttaatattatttcccttctgtggaaactctctaaacaacaggatgaaacccataaattggagtcatggcttcgaaagaactaccttattgattttaaacaccattttatgagtcgttttccatatgtcttaaaagaaataaccaagcacaaaaggaaagagccaaataaaagcatcaagcattgcacagttctctccaataacatagatcgtctcttactgaatttaacactgtctgatatcatggtctccctggcaaatgcgtcaaccttgcagaaggattgcagttggatagaaatgataaggaaatttgtaacagagacccttgaagatggctctaggctaaatagtaagcaactgaacagattgctgggagtatcctggaggttaatgcaaatacagccaaacagagaggacacagagactcttattaaggcagtttatacattatatcagcagaggggccttatccttccagttcggactttgttattgaagtttttcagtaaaatctatcagacagaagaactgagatcttgtagattcagatatcgtagtaaagtgttatcccgttggctggctggcttaccattgcaacttgctcatcttggctcccgaaatcctgagctctctacacagcttatcgatatcattcataccgctgcagcacgagcaaataaagaattactaaaaagtttacaagctactgccctccgaatttatgatccacaagaaggtgctgtggtggttctccctgcagactctcagcagcgtttggttcagcttgtatatttcctacccagtctgccggctgatttgctttctcggttaagtcgttgctgtattatgggaagactcagttcaagtttggctgccatgcttatcgggatactgcacatgagatcatcattttctgggtggaagtattcagctaaagactggttgatgagtgatgtagactatttcagcttcttattttccacacttacagggttttcgaaagaggagttgacttggcttcagagccttcgaggagttcctcatgtcatccagacacagctttcccctgtgcttctctaccttacagatttggatcaatttttacaccactgggatgtaacagaggcagtttttcacagtttattggttattcctgcccgaagtcagaactttgacatcttgcaaagtgccatcagtaagcatttggttgggttgactgtaattcctgacagcacggctggctgtgtttttggtgttatctgtaagctcctggatcatacttgtgtagttagtgagactctactgccatttctggcttcttgttgctacagtcttctttattttctgctcactatagagaaaggggaagcagaacatctaagaaagagggacaagctgtggggggtctgtgtctccatcctggctctcttgcctcgagtcctcaggttgatgctgcagagcctgcgggtgaacagagttgggcctgaggagctgcctgttgtgggccagctgcttcgactgctgcttcagcatgcacccctcaggactcatatgttgaccaatgcgatcttggtgcagcagatcatcaagaatatcacgacattgaagagtggaagtgttcaggaacagtggctcacagacttacattactgctttaacgtgtatatcactgggcatccccaagggcccagtgcactggctacagtgtattgaagaggccatagtacctcctgtttgaagttgtttattcacatctatcttatttgaagaaaaagactgatgtaatagatctttgtcattaaagctgaacttttaaaaaaaaaaaaaaaaaaaaa

SEQ ID NO: 96 - DNA, 3457 bp, human
  misc_feature (3036)..(3036): n is a, c, g, or t
atggctgtgtgaacgactgccatggcccaccggaagcttgagagcgtggggagcggcatgttggaccatagggtgagaccaggtcctgtccctcacagccaggagcccgagagcgaggacatggagctgcccttggagggctatgtgcccgagggcctggagctggctgccctgcggccagagagccccgcgccagaggaacaggagtgccacaaccacagccccgatggggactccagctctgactacgtgaacaacacctctgaggaggaggactatgacgagggcctccctgaggaggaggagggcatcacctactacatccgctactgccctgaggacgacagctacctagagggcatggactgcaacggggaggagtacctggcccacagtgcacaccctgtggacactgatgaatgccatgaggcggtggaggagtggacggactcggcgggcccgcacccccacggccacgaggctgaaggcagccaggactacccagacggccaactgcccattccggaggatgagccctccgtccttgaggcccatgaccaggaagaagatggtcactactgtgccagcaaagagggctaccaggactactacccagaggaggccaacgggaacaccggcgcctccccctaccgcctgaggcgtggggatggggacctggaggaccaggaggaggacattgaccagatcgtggcagagatcaagatgagtctgagcatgaccagcatcaccagcgccagtgaggccagccccgagcatgggcctgagccagggcctgaggactctgtagaggcctgcccacccatcaaggccagctgcagccccagcaggcacgaggcgaggcccaagtcgctgaacctccttcccgaggccaagcaccccggagacccccagagaggcttcaagcccaagaccaggaccccagaagagaggctgaagtggccccacgagcaggtttgcaatggtctggagcagccaaggaagcagcagcgctctgatctcaatggacctgttgacaataacaacattccaaaaacaaaaaaggtggcatcatttccaagtttggtggctgttccagggccctgcgaaccaaaaaacctcatcgacgggatcatctttgctgccaattacctggggtccacccagctgctatcagaacggaacccttccaaaaacatcagaatgatgcaagcgcaggaggccgtcagccgggtcaagaggatgcaaaaggctgctaagatcaagaaaaaagcgaattctgagggggatgcccagacgctgacggaagtggacctcttcatttccacccagaggatcaaggttttaaatgcagacacgcaggaaaccatgatggaccacgccttgcgtaccatctcctacatcgccgacattgggaacattgtagtgctgatggccagacgccgcatgccccggtcagcctctcaggactgcatcgagaccacgcccggggcccaggaaggcaagaagcagtataagatgatctgccatgtgttcgagtcggaggatgcccagctcatcgcccagtctatcggccaggccttcagcgtggcctaccaggagttcctgcgagccaatggcatcaaccccgaagacttgagccagaaggaatacagcgacatcatcaacacccaggagatgtacaacgacgacctcatccacttctcaaactcggagaactgcaaggagctgcagctggagaagcacaagggcgagatcctgggcgtggtggtggtggagtcgggctggggctccatcctgcccacggtgatcctggccaacatgatgaatggcggcccggctgcccgctcggggaagctgagcatcggggaccagatcatgtccatcaatggcaccagcctggtggggctgcccctcgccacctgccaaggcatcatcaagggcctgaagaaccagacacaggtgaagctcaacattgtcagctgtcccccggtcaccacggtccttatcaagcggccagacctcaagtaccagctgggcttcagcgtgcagaatggaattatctgcagcctcatgagagggggcattgctgagcgagggggcgtccgtgtgggccaccgcatcatcgagatcaacgggcagagcgtggtggccacagcccacgagaagatagtccaagctctgtccaactcggtcggagagatccacatgaagaccatgcccgccgccatgttcaggctcctcacgggtcaggagaccccgctgtacatctaggccaccccagcctggccacgcagccaggacaccgggcagggccgcccgggcccagaggagctgggagccgggccgcagacttgaccccgacgccacagcccagccacggacgctggctccccaaagggtgtgccctcaccacccacttgatttttttcattttgccaaaaaggggtatgtctttatcaaaggagagtcacagaacaaatgtttgtttgtaaagcgttccaagtattttgccacgttctggactgtcttctccctgcacaagccagggtgtgtctcggtagctgtgcgtggtgtggagtgtgtgtctttcctccctgaagctgtgcggagcgaactggcgcctccgagggacgcggctcccggggcagggcagccgtcacccctgcctcccgcccccttggctgggacgtctggggtcctgtggggcccccacaatggtcccaaacagctgcctctgccactgactgcagggacacgggcagcctggctcccaggacacgacttgtaatgaaagtttggggacatgtgattgattgattgattgattgtaaataaaggatgatggccacaacatgaaaactccatatttatttagatgctattattactgtttggacttttattttggcaggcttttttccagactctagggttttccaatgtgactaatgaccacacctgcctctcccgtcgtctcttctgggcaccctcccacccggctgcatacccggccagggctcccacagagacaagganggcacaggtgtctgccccctctttaaaatcgatctacacacatccacgcacatgcgaccccgagggaaacgaaacccactctagaaaacgcgaccttggccgcacctaaagcagccagccgtgagtgcagaccccttggccagcgtggcgcagtggccctgagcagtagtggcatgtgtgtagatcaagtcggatctagtccagctcggttcattagcgatccatgtaatctgacgtcatcttgtctcgaagtctctttttttggcccaggccttgaagaatacactgtgacttaagaagccttaccacgcagtaactaaagctttaggatgactgtattcgaggagtgccgtgtgttgcatgcagctacccgtaggaagacttcgcgcatatcactaataaacctgaagtcgtgatgacc

SEQ ID NO: 97 - DNA, 2930 bp, human
gaattccggtttcttcctaaaaaatgtctgatggccgctttctcggtcggcaccgccatgaatgccagcagttactctgcagagatgacggagcccaagtcggtgtgtgtctcggtggatgaggtggtgtccagcaacatggaggccactgagacggacctgctgaatggacatctgaaaaaagtagataataacctcacggaagcccagcgcttctcctccttgcctcggagggcagctgtgaacattgaattcagggacctttcctattcggttcctgaaggaccctggtggaggaagaaaggatacaagaccctcctgaaaggaatttccgggaagttcaatagtggtgagttggtggccattatgggtccttccggggccgggaagtccacgctgatgaacatcctggctggatacagggagacgggcatgaagggggccgtcctcatcaacggcctgccccgggacctgcgctgcttccggaaggtgtcctgctacatcatgcaggatgacatgctgctgccgcatctcactgtgcaggaggccatgatggtgtcggcacatctgaagcttcaggagaaggatgaaggcagaagggaaatggtcaaggagatactgacagcgctgggcttgctgtcttgcgccaacacgcggaccgggagcctgtcaggtggtcagcgcaagcgcctggccatcgcgctggagctggtgaacaaccctccagtcatgttcttcgatgagcccaccagcggcctggacagcgcctcctgcttccaggtggtctcgctgatgaaagggctcgctcaagggggtcgctccatcatttgcaccatccaccagcccagcgccaaactcttcgagctgttcgaccagctttacgtcctgagtcaaggacaatgtgtgtaccggggaaaagtctgcaatcttgtgccatatttgagggatttgggtctgaactgcccaacctaccacaacccagcagattttgtcatggaggttgcatccggcgagtacggtgatcagaacagtcggctggtgagagcggttcgggagggcatgtgtgactcagaccacaagagagacctcgggggtgatgccgaggtgaacccttttctttggcaccgcccctctgaagaggtaaagcagacaaaacgattaaaggggttgagaaaggactcctcgtccatggaaggctgccacagcttctctgccagctgcctcacgcagttctgcatcctcttcaagaggaccttcctcagcatcatgagggactcggtcctgacacacctgcgcatcacctcgcacattgggatcggcctcctcattggcctgctgtacttggggatcgggaacgaaaccaagaaggtcttgagcaactccggcttcctcttcttctccatgctgttcctcatgttcgcggccctcatgcctactgttctgacatttcccctggagatgggagtctttcttcgggaacacctgaactactggtacagcctgaaggcctactacctggccaagaccatggcagacgtgccctttcagatcatgttcccagtggcctactgcagcatcgtgtactggatgacgtcgcagccgtccgacgccgtgcgctttgtgctgtttgccgcgctgggcaccatgacctccctggtggcacagtccctgggcctgctgatcggagccgcctccacgtccctgcaggtggccactttcgtgggcccagtgacagccatcccggtgctcctgttctcggggttcttcgtcagcttcgacaccatccccacgtacctacagtggatgtcctacatctcctatgtcaggtatgggttcgaaggggtcatcctctccatctatggcttagaccgggaagatctgcactgtgacatcgacgagacgtgccacttccagaagtcggaggccatcctgcgggagctggacgtggaaaatgccaagctgtacctggacttcatcgtactcgggattttcttcatctccctccgcctcattgcctatttggtcctcaggtacaaaatccgggcagagaggtaaaacacctgaatgccaggaaacaggaagattagacactgtggccgagggcacgtctagaatcgaggaggcaagcctgtgcccgaccgacgacacagagactcttctgatccaacccctagaaccgcgttgggtttgtgggtgtctcgtgctcagccactctgcccagctgggttggatcttctctccattcccctttctagctttaactaggaagatgtaggcagattggtggttttttttttttttttaacatacagaattttaaataccacaactggggcagaatttaaagctgcaacacagctggtgatgagaggcttcctcagtccagtcgctccttagcaccaggcaccgtgggtcctggatggggaactgcaagcagcctctcagctgatggctgcacagtcagatgtctggtggcagagagtccgagcatggagcgattccattttatgactgttgtttttcacattttcatctttctaaggtgtgtctcttttccaatgagaagtcatttttgcaagccaaaagtcgatcaatcgcattcattttaagaaattatacctttttagtacttgctgaagaatgattcagggtaaatcacatactttgtttagagaggcgaggggtttaacccgagtcacccagctggtctcatacatagacagcacttgtgaaggattgaatgcaggttccaggtggagggaagacgtggacaccatctccactgagccatgcagacatttttaaaagctatacacaaaattgtgagaagacattggccaactctttcaaagtctttctttttccacgtgcttcttattttaagcgaaatatattgtttgtttcttcctaaaaaaaaaaaaaaaaaaaaa

SEQ ID NO: 98 - DNA, 322 bp, human
gtcagctcagcctccaaaggagccagcctctccccagttcctgaaatcctgagtgttgcctgccagtcgccatgagaacttcctaccttctgctgtttactctctgcttacttttgtctgagatggcctcaggtggtaactttctcacaggccttggccacagatctgatcattacaattgcgtcagcagtggagggcaatgtctctattctgcctgcccgatctttaccaaaattcaaggcacctgttacagagggaaggccaagtgctgcaagtgagctgggagtgaccagaagaaatgacgcagaagtgaaatgaactt

SEQ ID NO: 99 - DNA, 3514 bp, human
agcgacgcgtggagaagcggcccacgtgtctgcccagagtcaagtcctgtgttcttcccgctccttacgcatccgcggtccagggcgccctttcagccccgctggtgttcgcccaccccgggccgcgtgagtggggccccacgcagctccccgcactccgtgggccaacttggccaagcaactctgtccggggagcggtgcttgcggggggtgagtaccgggcactgcgcatgcggagctccaaattcaaacagctgttttcagaggctggagggcgggcggactggtagcagctggggctaggagaggctttctctaggaggcggccgctcgagagccatggtggaccggggccctctgctcacctcggccatcatcttctacctggccatcggggcggcgatcttcgaagtgctggaggagccacactggaaggaggccaagaaaaactactacacacagaagctgcatctgctcaaggagttcccgtgcctgggtcaggagggcctggacaagatcctagaggtggtatctgatgctgcaggacagggtgtggccatcacagggaaccagaccttcaacaactggaactggcccaatgcaatgatttttgcagcgaccgtcattaccaccattggatatggcaatgtggctcccaagacccccgccggtcgcctcttctgtgttttctatggtctcttcggggtgccgctctgcctgacgtggatcagtgccctgggcaagttcttcgggggacgtgccaagagactagggcagttccttaccaagagaggtgtgagtctgcggaaggcgcagatcacgtgcacagtcatcttcatcgtgtggggcgtcctagtccacctggtgatcccacccttcgtattcatggtgactgaggggtggaactacatcgagggcctctactactccttcatcaccatctccaccatcggcttcggtgactttgtggccggtgtgaaccccagcgccaactaccacgccctgtaccgctacttcgtggagctctggatctacttggggctggcctggctgtccctttttgtcaactggaaggtgagcatgtttgtggaagtccacaaagccattaagaagcggcggcggcgacggaaggagtcctttgagagctccccacactcccggaaggccctgcaggtgaaggggagcacagcctccaaggacgtcaacatcttcagctttctttccaagaaggaagagacctacaacgacctcatcaagcagatcgggaagaaggccatgaagacaagcgggggtggggagacgggcccgggcccagggctggggcctcaaggcggtgggctcccagcactgcccccttccctggtgcccctggtagtctactccaagaaccgggtgcccaccttggaagaggtgtcacagacactgaggagcaaaggccacgtatcaaggtccccagatgaggaggctgtggcacgggcccctgaagacagctcccctgcccccgaggtgttcatgaaccagctggaccgcatcagcgaggaatgcgagccatgggacgcccaggactaccacccactcatcttccaggacgccagcatcaccttcgtgaacacggaggctggcctctcagacgaggagacctccaagtcctcgctagaggacaacttggcaggggaggagagcccccagcagggggctgaagccaaggcgcccctgaacatgggcgagttcccctcctcctccgagtccaccttcaccagcactgagtctgagctctctgtgccttacgaacagctgatgaatgagtacaacaaggctaacagccccaagggcacatgaggcagggccggctccccaccccacctttgatggcctcttcccccctcaccctagggtgtcccgagatgaccgggacgcctggcccctggtggggggggcagcctcggaactgggagtggggggccaggggccttcctaaccttccatcatcctcagctagatgtatgcccgggacagggcctctgttctccagctgaaccataccctggctgtgggggcatctgtcctgagcttggctggtgtatctcacaatgcaaagacatgctggctggcgggacaggtgggcaggactgaccctgaggaggccttgcctgcagggtctttgtctcaccatttggtggagtatcacacggttctctgaggtctggggcctcagctgtttaagtttaccggtattactgagctcggcatttggagagggagctctgaagtgtctggggaggtaccgctgtgcgtggggtcaggtgtttccgtaccacagcaggagcagggcccgcccgcatcccagctgtgggcctgccggtcaggtcgggcacctactacaaaccgtagtggggtggaggctgctggaggtgggagtgaggagatgagggcagggtctcaaacagtcctgactcacagggcctggaaacaagtcctatgtgggcctggggcctggggtcctcatcctccttgttggtctactcaggcccagcccagagctgtgttccctgtctcaggtcaagcagtggcagacgcaaggctttctgtgggcccccaagtggtaggagggagagtagcagagcatgggttactggaagccgggactgctagggctggtggccagggagctgcaagagtgaggctcagctctggctggttctgcccttacccctcctgcccgcctgagaactgcacaccctgcccgctggccccaggacctgcactcccaatcctgctgtcttctccttccctgtgccctgaacaaggacctcactgcccgccttcccctcccaccagccccctggggctggcccactgtgtcctgaatgtttttgttattttttgttttattttttaaacaaactgctgtttttatatacctggaatctgttgttggcttcagagccagtggttaaagagcagggtcccaaggattgggagatctagtgtctgccctcctgccctgcaactcaattgggcctttttcggtgacctcatccaaggccatgatgtcaagggccatgtccccaagcagaggtggagaaggggacactgaggtgagcaaaagcaggaaggggcatccactgcgggtgactggaggccgggcaggaagcaagtcatcagagccgctcagctccgttcactctctgccttctgccccactactgtggggcagtggggccagagcccacctccccaacatgtgaagacagtgatgggcacgtgcccacacccccacttctctagccgtttgcagaggccgccacccagcacgggcctgaaaaggagcagcctcgtatttttctgtgaaatgttttaatgaaccatgttgttgctggttgtcctggcatcccgcacactgtatgtacatactggcaacgatgtcaaatgtaatttattttaacatttttacaataaaacatgaggtggacaggcaaaaaaaaaaaaaaaaaaaaaaaaaaaaaaaaaaaaa

SEQ ID NO: 100 - DNA, 2744 bp, human
ctcgtgccgaattcggcacgagaccgcgtgttcgcgcctggtagagatttctcgaagacaccagtgggcccgtgtggaaccaaacctgcgcgcgtggccgggccgtgggacaacgaggccgcggagacgaaggcgcaatggcgaggaagttatctgtaatcttgatcctgacctttgccctctctgtcacaaatccccttcatgaactaaaagcagctgctttcccccagaccactgagaaaattagtccgaattgggaatctggcattaatgttgacttggcaatttccacacggcaatatcatctacaacagcttttctaccgctatggagaaaataattctttgtcagttgaagggttcagaaaattacttcaaaatataggcatagataagattaaaagaatccatatacaccatgaccacgaccatcactcagaccacgagcatcactcagaccatgagcgtcactcagaccatgagcatcactcagaccacgagcatcactctgaccataatcatgctgcttctggtaaaaataagcgaaaagctctttgcccagaccatgactcagatagttcaggtaaagatcctagaaacagccaggggaaaggagctcaccgaccagaacatgccagtggtagaaggaatgtcaaggacagtgttagtgctagtgaagtgacctcaactgtgtacaacactgtctctgaaggaactcactttctagagacaatagagactccaagacctggaaaactcttccccaaagatgtaagcagctccactccacccagtgtcacatcaaagagccgggtgagccggctggctggtaggaaaacaaatgaatctgtgagtgagccccgaaaaggctttatgtattccagaaacacaaatgaaaatcctcaggagtgtttcaatgcatcaaagctactgacatctcatggcatgggcatccaggttccgctgaatgcaacagagttcaactatctctgtccagccatcatcaaccaaattgatgctagatcttgtctgattcatacaagtgaaaagaaggctgaaatccctccaaagacctattcattacaaatagcctgggttggtggttttatagccatttccatcatcagtttcctgtctctgctgggggttatcttagtgcctctcatgaatcgggtgtttttcaaatttctcctgagtttccttgtggcactggccgttgggactttgagtggtgatgcttttttacaccttcttccacattctcatgcaagtcaccaccatagtcatagccatgaagaaccagcaatggaaatgaaaagaggaccacttttcagtcatctgtcttctcaaaacatagaagaaagtgcctattttgattccacgtggaagggtctaacagctctaggaggcctgtatttcatgtttcttgttgaacatgtcctcacattgatcaaacaatttaaagataagaagaaaaagaatcagaagaaacctgaaaatgatgatgatgtggagattaagaagcagttgtccaagtatgaatctcaactttcaacaaatgaggagaaagtagatacagatgatcgaactgaaggctatttacgagcagactcacaagagccctcccactttgattctcagcagcctgcagtcttggaagaagaagaggtcatgatagctcatgctcatccacaggaagtctacaatgaatatgtacccagagggtgcaagaataaatgccattcacatttccacgatacactcggccagtcagacgatctcattcaccaccatcatgactaccatcatattctccatcatcaccaccaccaaaaccaccatcctcacagtcacagccagcgctactctcgggaggagctgaaagatgccggcgtcgccactttggcctggatggtgataatgggtgatggcctgcacaatttcagcgatggcctagcaattggtgctgcttttactgaaggcttatcaagtggtttaagtacttctgttgctgtgttctgtcatgagttgcctcatgaattaggtgactttgctgttctactaaaggctggcatgaccgttaagcaggctgtcctttataatgcattgtcagccatgctggcgtatcttggaatggcaacaggaattttcattggtcattatgctgaaaatgtttctatgtggatatttgcacttactgctggcttattcatgtatgttgctctggttgatatggtacctgaaatgctgcacaatgatgctagtgaccatggatgtagccgctgggggtatttctttttacagaatgctgggatgcttttgggttttggaattatgttacttatttccatatttgaacataaaatcgtgtttcgtataaatttctagttaaggtttaaatgctagagtagcttaaaaagttgtcatagtttcagtaggtcatagggagatgagtttgtatgctgtactatgcagcgtttaaagttagtgggttttgtgatttttgtattgaatattgctgtctgttacaaagtcagttaaaggtacgttttaatatttaagttattctatcttggagataaaatctgtatgtgcaattcaccggtattaccagtttattatgtaaacaagagatttggcatgacatgttctgtatgtttcagggaaaaatgtctttaatgctttttcaagaactaacacagttattcctatactggattttaggtctctgaagaactgctggtg

SEQ ID NO: 101 - DNA, 2212 bp, human
tgccggctgctcctcgaccaggcctccttctcaacctcagcccgcggcgccgacccttccggcaccctcccgccccgtctcgtactgtcgccgtcaccgccgcggctccggccctggccccgatggctctgtgcaacggagactccaagctggagaatgctggaggagaccttaaggatggccaccaccactatgaaggagctgttgtcattctggatgctggtgctcagtacgggaaagtcatagaccgaagagtgagggaactgttcgtgcagtctgaaattttccccttggaaacaccagcatttgctataaaggaacaaggattccgtgctattatcatctctggaggacctaattctgtgtatgctgaagatgctccctggtttgatccagcaatattcactattggcaagcctgttcttggaatttgctatggtatgcagatgatgaataaggtatttggaggtactgtgcacaaaaaaagtgtcagagaagatggagttttcaacattagtgtggataatacatgttcattattcaggggccttcagaaggaagaagttgttttgcttacacatggagatagtgtagacaaagtagctgatggattcaaggttgtggcacgttctggaaacatagtagcaggcatagcaaatgaatctaaaaagttatatggagcacagttccaccctgaagttggccttacagaaaatggaaaagtaatactgaagaatttcctttatgatatagctggatgcagtggaaccttcaccgtgcagaacagagaacttgagtgtattcgagagatcaaagagagagtaggcacgtcaaaagttttggttttactcagtggtggagtagactcaacagtttgtacagctttgctaaatcgtgctttgaaccaagaacaagtcattgctgtgcacattgataatggctttatgagaaaacgagaaagccagtctgttgaagaggccctcaaaaagcttggaattcaggtcaaagtgataaatgctgctcattctttctacaatggaacaacaaccctaccaatatcagatgaagatagaaccccacggaaaagaattagcaaaacgttaaatatgaccacaagtcctgaagagaaaagaaaaatcattggggatacttttgttaagattgccaatgaagtaattggagaaatgaacttgaaaccagaggaggttttccttgcccaaggtactttacggcctgatctaattgaaagtgcatcccttgttgcaagtggcaaagctgaactcatcaaaacccatcacaatgacacagagctcatcagaaagttgagagaggagggaaaagtaatagaacctctgaaagattttcataaagatgaagtgagaattttgggcagagaacttggacttccagaagagttagtttccaggcatccatttccaggtcctggcctggcaatcagagtaatatgtgctgaagaaccttatatttgtaaggactttcctgaaaccaacaatattttgaaaatagtagctgatttttctgcaagtgttaaaaagccacataccctattacagagagtcaaagcctgcacaacagaagaggatcaggagaagctgatgcaaattaccagtctgcattcactgaatgccttcttgctgccaattaaaactgtaggtgtgcagggtgactgtcgttcctacagttacgtgtgtggaatctccagtaaagatgaacctgactgggaatcacttatttttctggctaggcttatacctcgcatgtgtcacaacgttaacagagttgtttatatatttggcccaccagttaaagaacctcctacagatgttactcccactttcttgacaacaggggtgctcagtactttacgccaagctgattttgaggcccataacattctcagggagtctgggtatgctgggaaaatcagccagatgccggtgattttgacaccattacattttgatcgggacccacttcaaaagcagccttcatgccagagatctgtggttattcgaacctttattactagtgacttcatgactggtatacctgcaacacctggcaatgagatccctgtagaggtggtattaaagatggtcactgagattaagaagattcctggtatttctcgaattatgtatgacttaacatcaaagcccccaggaactactgagtgggagtaataaacttc

SEQ ID NO: 102 - DNA, 494 bp, human
ggaaactgaggctcaggagagaggcgctccaggccgatgcagccaacaaaccggcgccctcttcacacgtagctcctcaggccattccccatgagtcccccacacccaccccatcctcggtctttgcaaagaagggcccgagcttagtttccccaggactggcctaggaaggagcaccggccacagctgctccccgtgccactcagggtggacccagcatctcaggagcacctcagggtgtcggttaagagacaggcctccacccctgcaccagagcctgctcttagctcccggtgcccccagaccccgcagctctgtgcccggcaagaagcagctagacacacgccagggcgccaagcacggccagctccgcggacccatggacaagcccagccccgcctcagggaaaacagggcctttccctacaggacacgccccagagctgtggcagattgcaggagccatcgtgtggggagaatttaataaaagccctt

SEQ ID NO: 103 - DNA, 772 bp, human
gccaaagagttcaagacacgtctggggatctttcttcacaaatcagagctgggctgcgatactgggagtactggcaagttcgagtggggcagtaaacacagcaaagagaatagaaacttctcagaagatgtgctggggtggagagagtcgttcgacctgctgctgagcagtaaaaatggagtggctgccttccacgctttcctgaagacagagttcagtgaggagaacctggagttctggctggcctgtgaggagttcaagaagatccgatcagctaccaagctggcctccagggcacaccagatctttgaggagttcatttgcagtgaggcccctaaagaggtcaacattgaccatgagacccgcgagctgacgaggatgaacctgcagactgccacagccacatgctttgatgcggctcaggggaagacacgtaccctgatggagaaggactcctacccacgcttcctgaagtcgcctgcttaccgggacctggctgcccaagcctcagccgctctgccactctgtccagctgcagcctggacgagccctcacacacctgagtctccacggcagtgaggaagccagcgggaagagaggttgagtcacccatccccgaggtggctgccctgtgtgggaggcaggttctgcaaagcaagtgcaagaggacaaaaaaaaaaaaaaaaaaacgggggcactagcggggggggaaaaaggggttcgaaaggccaggtgccaagggtccggaacccattttcttgtccaggggcac

SEQ ID NO: 104 - DNA, 2203 bp, human
ctgatgatcttgaccgacccagtgaggaagttttctctagagatctttcagattttccatctctagaaaatggcatgggaacaaatgatgaagatgaattaagccttggtttgcccactgagctcaagagaaagaaggaacagttggacagtggtcacagaccaagcaaagagacgcaatcagcagctggtctcacccttcctctgaacagtgaccaaacctttcacctgatgagcaacctggctggggatgttatcacagctgcagtgactgcagctatcaaagaccagttagagggtgtgcagcaagcactttctcaggctgcccccatcccagaagaggacacagacactgaagaaggtgatgactttgaactacttgaccagtcagagctggatcaaattgagagtgaattgggacttacacaagaccaggaagcagaagcacagcaaaataagaagtcttcaggtttcctttcaaatctgctgggaggccattaatctaggaatcagctcgcaacagagcacaaaaaacaccaaaaaaatttcaaacaagaaaaaaaaaaaaaaaaaggaaaagaaaaaaattgaactgtaagctttaatgattactttagatttgttttattttccctcctgcagtgaattaattggatatatatcagctgacactgatagattgatatttctgatcgttatttttgtgtaataagcatggaaatgaactttatacacaccactgtgttgtcagagataaatattaggggttgtttttaaagcaaaaagaaaaaaacaaaaaccaaactattaaaatcctcctataaatattctttttctttacagtttttcaagcatgcaaaacagtttattgtaacttactgaaaaatattaacaattaattgtgaatacatgctgttaccagcttccttattcctaatacctggaaaatttttttttcaacggatagattttgatgtaaaaaagaccgaaattatcaaggtatcttagttgaaggacttgggaaatactatcaaaattaatttcttaggaaaaaatttaaaagtatatttaagtactctggatagactgaaacgtttccatgttatttctgcagttgtagacttaggcttatttgtaaagaagcatgctccattgactgccatctctagtcttgcagtgggtggtattaacccatagaaagcaagcagttgtgtatcacatagacaatggttatgatgtaaacagattcagttgttttgttgttcattcgtcatatgtttgtgatagggatgttgggagcacagctctattctgcctgctcagacttaagttagacccttatcttttatattatgtcatgaaaaaagtctcctaaaattgtgaaactagttcttgatgagtgatgtgatcatcagcaataaagatataataactctgttttcttagcctgtatagaggagaggaacctgcttggctttaaaatatatttatttgccatttaagtataaatatggaatctgtttcttattgggaagatagaatatatatattttcctttaaactttttaaggtcacttttaaataaccaaatttgatttatggtttttaacaaaggactaaagagctgaaaccaacctagttttgtttttgtgatataaactttaagtgtcgagggaccatgccagcaactaccaaaaatctcttaaatcttcaggtacagctggcattttggcagatgcatagagacatctgagaccctcagaaaggaaggataatccaagaatataggaaatctgtgttctcttcctttcattttatcccttatatttctaaagactaattataagtaatctgacattttaatgtagctactcttatttattttttctttctgaggtattaaaatatctggactgagttttgccaaatgttaaagggagaagagttactgaagactttgaacacttgctttttgtgattgcttatgtcattagtgcctcatgactgtgtttgatgtcctttattgatacaaagtgagcctgtgccttcattatcttgcccattttaatacaaatggaaacctggtgtttgaaaatctctgaactgtgtgggttttggaggaatatacctgaattttattcaataacagtttctggacaggaagaaaaatacagttacatatttataaaaaaaaaaaaaaaaaa

SEQ ID NO: 105 - DNA, 266 bp, human
atgcccaagtgtcccaagtgcaacaaggaggtgtacttcgccgagagggtgacctctctgggcaaggactggcatcggccctgcctgaagtgcgagaaatgtgggaagacgctgacctctgggggccacgctgagcacgaaggcaaaccctactgcaaccacccctgctacgcagccatgtttgggcctaaaggctttgggcggggcggagccgagagccacactttcaagtaaaccaggtggtggagacccatccttggctgctt

SEQ ID NO: 106 - DNA, 2414 bp, human
cccgcgtgcatacggttgccggcatggcacattacaacttcaagaaaattacggtggtgccgtccgccaaggacttcatagacctcacgttgtcgaagactcaacgaaagactccaaccgttattcataaacattaccaaatacatcgcattagacatttttacatgagaaaagtcaaatttactcaacagaattaccatgatagactttcacaaattctaacagatttccccaaattggatgatattcatccgttctatgctgatttgatgaatattctctacgacaaggatcattacaagttggctctggggcaaataaatattgccaaaaatttagtggacaatgttgctaaagattatgtgcgactgatgaagtatggcgactctctctaccgctgcaaacagctgaagcgtgcggccctgggacggatgtgcacagtgatcaagaggcagaagcagagtttggagtatttggagcaagtgcgtcagcatttatcccgtttgccaaccattgatccgaataccaggaccctgcttttgtgtgggtacccaaatgttgggaagtccagcttcatcaacaaggtgacgagagcagacgtggatgtccagccctatgcgttcacaaccaagtctctgtttgttgggcacatggattataagtatctacgttggcaggttgtagacactcctgggatcctggaccaccctctggaggataggaacaccatcgagatgcaggccatcactgccctggcccacctccgtgctgcggtcctgtatgtgatggatttgtctgagcagtgtgggcatgggctgagggagcagctagaactcttccagaacatcagacctctcttcatcaacaagcctctcatagttgtagccaacaaatgtgatgtgaagagaatagctgaactttctgaagatgatcagaaaatatttacagatttgcagtctgaaggattccctgtaatagagaccagcaccctgactgaggaaggtgttattaaagttaaaacagaggcttgcgataggcttttggctcatcgagtggaaaccaaaatgaagggaaataaagtgaatgaggtgctgaatagactgcacctggctatcccaaccaggagggacgataaggagaggccccctttcatccctgaaggagtggtggctcgcaggaagaggatggaaactgaggagtccaggaagaagagggaacgagatcttgagctggaaatgggagatgattatattttggatcttcagaagtactgggatttaatgaatttgtctgaaaaacatgataagataccagaaatctgggaaggccataatatagctgattatattgatccagccatcatgaagaaattggaagaattagaaaaagaagaagagctgagaacagctgctggagagtatgacagtgtatctgagagtgaagacgaagagatgctggaaatccgacagctggcaaagcaaattcgagagaaaaagaagttgaaaattctggagtccaaagaaaagaatacacagggacccaggatgccgcgaactgctaagaaggttcagaggacagttttggagaaggagatgcgtagtcttggtgttgacatggacgataaagacgatgcccattacgcagtccaggcaagaagatcccggagcatcactaggaaaagaaagcgggaagactctgctcccccgtcctctgtggcccggagtgggagttgctctcgaactccacgtgacgtttctggtcttagggatgtcaagatggtgaagaaagccaagactatgaagaatgctcagaagaagatgaatcggttggggaagaaaggggaggcggatagacacgtgtttgatatgaagcccaagcacttgctgtctgggaagaggaaagctggtaaaaaggacaggagatagtatccgtttggttggcgtggcttcgctagagtgttgctgtttatttcctggtttggtacagtatggtttcatgaaattggagctctgtacaaactgaaaaagacaaaataagtaaagcacttgttgctttgctgaaaactatggttaaccctatataggtgtgggaaatttttgtcactgcataatattacaaatattttgagtagacagtgtttccacatttaatggagtatcagttgcttcagattttcagaactgggaagatttactggtgtaactgggttgtttttgatggagaaaaaccttattttcttttgtaagagctgggagcaaacacgtttatgagtgtgtcggaatcccgtgcttaaaatacgctcttaaattattttctagtcttattttacaatgtctcattgtagtctgtcttcaactattttatccaaaataaacctccagaagaaactaaaaaaaaaaaaaaaaaaaaaaaaa

SEQ ID NO: 107 - DNA, 110608 bp, human
gatcatcagagtgacagaatgagaagccaccatctggccaccatcacgatcatcatcacaatcacgacgagtcaccaagagactaaaactactgagtaaaagcttagaaacggctgggcgcgctggctcacacctgccatcccagcactttgggaggctgaggtgggcggatcacaaggtcaggacatcgagatcgtcctggccaacacagtcaaaccccatttctaccacaaaaaattagccaggcatgatggcgcgtgcctgtaatcccagctactcaggaggctgagccaggagaatcgcttgaacccaggaggcggaggctgcagtgagcggagatcgcgccattgcactcctgcctgggcggcagagtgaaactctgtcccagaaaaaaataaagcttagaaagaggctatgtagtctcgagataaatccagccctatgaggcacatgtcaatcacagagggaaagctatgcacgcacaaagcatgtgtgaatcagagagaaagctatgcacgcacgatgagtagaagacaaacacgtcctgcaaggagacggaggcgcagggaaggggcggcagccgtcctcccaagacatgaggacttctagttcagtctgagaccttggtgcagggctgggcgagtaaacaaatgcaaaagaataaggacctcgaggtcgggcgcggtggctcaagcctgtaatcccagcactttgggaggccgaggtgggcgcatcacgaggtcaggagattgagaccatcctggctaacacagtgaaaccccgtctctaccaaaaatacaaaaaacttagctggacgtggtggtgggtgccagtagtcccaactacacaggaggctgaggcacgaggatcacttgaacctgggagacggaggctttagtgagctgagattgcaccactacactccaacctggctgacagagcgagactgtctcaaaaaaaaacaaacaaacaggtctggtgtacccagaatggaggcaccacgagttgctgaagaaggaaactttattcagtctatgataccaggacagttgtccatgctgccaggcaaaaagaaaaactggattctgatctcattatcagtacacaaacagcgacaattagtaacactgacacagccctgactgtgctgctggagggtccgaagcactctctgcacagcggtgaatccccacaatagccctctagggaaggtgctgttatcacccacgcgagacacacgaaggaaaggcacggctttgcagcagcagggtcacgattcgaacccaggtggcctgctcttatgataaacttaaatgtgtaaaactttatgctcaggaaaatataagagaatgtcttcctgaccctttttggggtaggacaataatttctctaaccaaaccccaaaagcatgacccattaaaaaaagggtcaggtggactaacttggctaaatgaagaattctgtttcaccaaagtacaccacaaagtgggccgggcgcagtggctcatgcctgtaatcctagcactttgggaggccaaggtgggcggatcacttgaggtcgggagctcgagaccagcctgaccaacatggtgaaaccctgtttctactaaaaatacaaaaattaaccaggtgtggtggtatgcacctgtaatcccagctactcgggagggtgaggcaggagaattgcttgaacccaggacggggaggttgcagtgagcccagactgcgccgctgcactccagcctgggcaacagggtgagaccctgtctcaaaaaaaaaaaaaaaaggccagacttggctcacgcctgtaatcccagcactttgggaggctgaggtgggtggatcacctgaggttgggagttccagatcagtctgaccaacatggagaaaccccatctctactaaaaatacaaagttggccggcatggtggcacatgcctttaaccccagctgctcaggaggctgaggcaggagaatcacttgaacacgggaggcagaggttgtgatgagccaagatcgcgccattgcacaacagcctgggcaataagaacaaaactctgtctcaaaaaaaaaaaaaagaaacaaaaaaaaatatatatatatatatacataccataaagtgaaatcaacagccacaacctgggaaaaaatacttgcaacatggcaaaggattaatatccagaaagtataaagaattcctacaaaccaagtagaaaaacaggcaaaaaaaaaaaaatgttggcggggcatggtggctcatgcttgtaatcccagcactttgggaggccaaggcgggcagatcacctgaggtcaggagttcgagaccagcctggccaacatgatgaaactccgtctctaccaaaaatacaaaaattagccaggcgtggtggcaggcgcctgtaatcccagccacgcaggaggctgaggcagcagaatcacttgaacctgggaggcggaggttgcagtgagctgagactgcgcctgctccagcctgggtgacacagcaagactccgtctcaaaaagtaaagaaaaaaaaaaaacaaaacaacatatttcacagagaagaatttatgtttttggagaaggagtttcgctcctgtcgcccaggctggagtgcagtggtgagatatcagctcactgcaacctcaacctcccaggttcaagcgattcacagaggacaatttctaaaaggcaaataagaagcaggaagggtgcatgctccttctctactgccctgtaacagtcattccacacttaccacctcaaaacaacaaatgcttttgatgttggctcctgtggggcagcaatctgcgggaagcttagccaggcacctctggcttaaggtccctcctgaagctgcagtcacaccatggaccagggctgtgacctcatccgaaggctcaactggggctgaggcccacctctgagctcactcaggtggacgctggctgggttcagttccttgctggctataggtggaaagggcccccaccagtttcttgccagcttctccacaggacgccccacagcctgacaggagctttcatccagcaagctcatcagggagtgggagagagcagccaggacaggagcccagacctttctgaacctcatctcagaagtgacatccttcccttctgctgtctgggcacagctccccgggtggagcccgaggactagaaggaaaagaaaacttggatttaaaatgggataaagccataggagctgctcgtcccaccacaggaatctcaacgccgggttactgacaaagcgtcactttgcacctcgtccaactgtgcagacctctcctagccaggcccctgcaccagaggttaagaatccgtgcccctggtcaggaagtccaggtgggttcaaacggccagcagggaatttcaggcaaaatgtgtcccaaatcttcaaaccatgccccagaactcagacctccccctgggagttcgtcccaaggaaaccacctgcaagaggctcaggctgcaggggacactccgcttccaaaacccggaagctggagaccacacaagtgcccaacgccaaaggcaccccgtggagggacgccctgtgccctcccccgaccaggtgacccgctgcgccctacacatcttcaccaggaaacatctgttatcgatgtggacgaagcgcagcctgcactcccagatccgctcattttcgttctgccctccgttttacgattcgcctacactgaaaatgcgtgagtggagtggaaagccttcctactcctgcctcagcgaccccttctaaaatactgcctcgtttggcctgaaaatgtgatttgcaggcttcctgagcaaagtagatttcactccattaaagaaaaaaaaaaagaaaaggcaccgaacggggctcggctgtcgggagttttgctttagttttttgcgtgttttgttttgtgtttttttgttgttgttgttctttttgcggccacgcacaccgcgttcccaggcttcagggcgtgggggtcgccgtggactcccggacgtgaaaacgcttaaagccagctgggaaaaccccaccagcgttttccgcgcacagcgccagccataggaaaggacccccaggagcgaatccgggcagggaaaccccggacgcccgcacactcagcatcagtaccggcacccagcacccagcaccgagcaccgagcacgcagcacccagcaccgatcaccgagcagagcaccccgcacgcagaacccaccgagagcctgatgcagtctccgccgcaggcatagcgctaggccccggcgccttcacaacaaagggacgctggcgggcggggcctgagaggcgcgcggtggaggggccgggcgcgaggccgcggagacagctcggagctcggcactggggagtggcacagcgctggcggatccaggtgggcttcacggggcgcccgcgggaccggaaatgacgcgcagaaccctgcatcgggctcctcgctgccccgcgggcgccgctcctcagtgccccagagccacggagccggggaaacgcgccgcggcccacaacgcccccgcggctgcccgttggttccgcccgggccgttctactccaggcagacgggaggagaaacacggcgcgctcagcgtcccctcccccgttggttctgctcgggcccttccactgcaggccgacgggggtggaaacacgcagttttttttttttttttaaggtctagggtaacacggggcttttaagtgcctctccgctgccgcctggtggtccagcccgggccgttgcagtgcagccacacggggagggacacggcgcgccgagtgctccgggcggccgcacgttggttccgcccgggccgttccactgcaggcagagggagaggacgacggtgcgcgtagtgcatccccgtggcccgttggttccgccggggccgttccactgaaggcagaaggggggggaccgtggccccaccccccgcggcagcccgttggttccgcccgggcggttccgcccgggctgttccaccagcggcacttcagggcgggatcggccagtctgtggaggcagcggcctctaagccccggagggtttactgcccaggtttgggttccaggaataagaaatccactgaataggcttaacttagaagacacaaaggcgcctcctggcggaagtggccacgctccgcccagcctgagggaaagctgctctgacagctgggcccggagctgcggggggcggggccgccgcgcggggtgaggactcgcctcagggcgctgattggctggtggcgcgctccggggcggggccttcgtatccaggctggcgtcggggctgccgcgggacatccggagcagacacccgcgggcgcgcctgcggccccgaggacccccggctccggagcttcgtcgagcgttttcctagcgttactttcccaaataattttcaggaatgaagttacggctaaagggctctttagagattacttttgggccgggcccggtggctcacgcctgtaatctcaacactttgggaggccgaggccggcgcatcacgaggtcaggagcttgagaccagcctggtatggccaacgtggtaaaacgtcgtctctactaaaaatacaaaaattggccgggcgtggtggcgggcgcctgtaatcccagctactccggaggctgaggaaggaggatcacctgaacccgggaggcggaggttgcagtgagccgagatggcgccactgcactccagcctggcgacagagcgagactccctgtcaaaagaaaaaagaaaagattacttttggccgggcgaggtggctcacgtctgtaatcccagcattttgagaggctgaggcgggcggatcgcctgaggtcaggagttcgagaccagcctggccaacatagtgaacccccccccatctctactaaaaatacaaaaaaaaattacccgggtctcgtggcgcgtgcctgtggtccccgctactcgggaggttgaggcaggagaatcgcttgaaccttggagttgaaggttgcagtgaggcgagatagcgccgctgctctccgacctgggcgacagtgggagacttcatctcataaataaataaataaataaatattacttttacgttttgttaaacttccacttgtttttgtttccgttgcatgaaccttcgtaaagcttcaggaggctgatggcagcctccttccccaggcttccccgtggcgcccgcagccgggttgggccagaggctgggactgtttcctcccgtggggtctttggtggggatgtccccagaggagtggggcaggaggaggggcacggagcgcccccgggagccggtcagagcgcagcgatggtgtctgtggttccaaccactcgggaggctgaggtgggaggatggcttgagcctgggagcttgaggctgcagtgagctagaatcacagcaccacactccagcctgggcgacagagtgagacccttgtctcacaaaaaaaaaaaaaaaaaaaaaaaaaaaaaaaaaaaggctgggtgcgttggctcgcgcctgtaatcccagcactttgggtggccgaggcgggcggatcacgaggtcaggagatcgagaccatcctggctaacacgatgaaaccccgtctctacaaaaaatacgaaaaaaaattagccgggcatggtggcacgtgcctgtaatcccagctacttgggaggctgaggcaggagaatcacttgaactcaggaggcagagcttgcagtgagccaagattgggccactgcactccagcctggcgacagagtgagactccgtcaaaaaaaaaaaaaaaaaaaaaaggaagaaagaaaattataaaatgaagtgaaattaacgcagtggagtgccacctgcctgctgcctgagttcactatccacacggagttcataaatttgagagcagtttacaaagtagattctcctactttccaggaaacccagaaatgtctggtgatttgcccaacagtctcagctgttgtggtcagcagggccgctgtggtatccaaatgatttcaaaagcagatttataaaaagtactccttttttttttgagatggaatttcgctctcatcgcccaggttggagtgcagtggcacgatctcagctcactgcaacctccgcctcccgggttcaagtgattctcctgcctcagcctcctgagtagctgggattacagatgtgtgccctcacgcccagctaatttttatatttttagtagagacagggtttcaccatgttggccaagatgttctccatctcctgaccttgtgatctgcccgcttcagcctcccaaagtgctgggattacaggcgtgagctaccccacgcccggcctttatttttttttgagacggagtctcactctgtcgcccaggctggagtgcagtggcgcgatctcggctcactgcaagctccacctcccaggttcaagagattcttctgcctcagcctcccgaggagttgggatcacaggcacccgccaccatgcccagctaattgttttgtatttttagtagagacggggtttcaccgttgttagccaggatgctcttgaactcctgacctcatgatccacccaccttggcctcccaaagtgctgggattacaggtgtgagccaccacgcctggcctctcaaagtttttatagcaaagccttacatttcatgaggaaccatgcattttattttatttttgagatgggggatctcgctactttgcccaggctgggctcaaactcagggctctctggcctcagcctcccgagtagctgggtctgcaggtggctgtcaccgtgctgggcctggggtgtgcgtattaatgattttggaatagtgtctggaagcctgtgtgctttcctctcttcctctccccagaaggacctcccacctcgtcctcccaaagtgttgggattacaggtgtgagccaccatgtcccctctctttgctattttgcctgggaggagtgtattaataattttaattttaaagttctttgattatgttctagtttgattattgatcatttacttcttagctatttatattcttccttgagtcatcggtttctgccctttgacaatttttctgtgaatgttttgtgtcgattatatgagctttgtctgtattgagaacatccacgaattgtattattgcatctgttttgctagttgagaacatcgacctgctgtattattgcaaatgttttcctgcttgcatgtagtcatttgttgtgcatattaatgaatttctatccacatgacgccggaaggggatagagtgggtggggaggaagagggaagggtccccacctggagacccagcctgcaggccactcggccacctgcgcagaggtaggggagcagcagccgctcatgcccctgcaatttgtcctcatcagcaggtggggaaactgaggccggggagttctccaggccaaggtcactcacgggcaagttcccgcagcctttggaccctccatacatgtcagggccgctcatgctttcctgggcccttcactggtttggaggaaccatcctgtttcccagagcgcactgcctgtctctgagtgtatgtgtctcagtggcgtccatgtgtatttttctgtgtgtgtatctgtgtgagtctgtgtgtgtggtgtgtttgtgtctgagtgtgtggtgttagcgtgtgtctcagtggcgtccatgcatatttttctgtgtgatgtgtctgtgtgtgtgtctctgagtgtgtggtgcctgcgtgtgtctcagtggtgtccatgcatatttttctgtgtggtgtgtctgtttgtgtgtgtgtgaatctacgtgggtgtttgtccatctttttgtctggcctcctgtcccctctgcacagagcagctgggtggggatgctggtcctgggggcttgtcagcaggatgtgggcgtggggcagccctgggtgaggcctgagtacaggccccaggtgcctcctgcacaggggtggctgagccggctcctctgtggctcccgggtccccaccgccggtcactgggcaccacctgtcctggccacccactcctgcccaccctgctctccgcaggggcctccttcctctttcagctgtgcgccctggttgtggaggctcctaaggaggttgtggcctcggtttaccacctgccttggctccttggtgttgccagaccctgaaggcagcccatgccctggctgagatccttctggggcaggatgtgctggaagcagctgaaacatgtggtgatgtaccagctcctgctgtcccctacatccccagcaccgccagccttccctgggctcctccagctggcttctctaccctgtacctgccccaccctgctttcccccgaccctactaccccccaaccagacttccagctccaggcagggtcgcagcctcctgggctcccagcaggacaggcctcacccagaccccgcaggagccgtgggacttgggctgggtctttgggcctggctgcagcccctttggacctgacctgaggagacaccctggctgtgggaggcagggtgggggtgccgggcccagcacagaggtgcccagggtgcaggctggcactggcccggcagggaccgtggatgccgccgtttcaggctcgaaaaggtttccatgccccagagcctgagcccggcagcccccgaggatgtcttggggcctctgtgctccccaaagccaagaaggttaggcttgacccacagcctcttccaggccggggaggcagaggcgctccaggtcggtagggcggggcccacagcccagggtttcacgtccccaaaacggggcagggtgctggaggggcaggtgtccacagggtggtcgttttggtctctcctggacttgcacgcgtgtagtgcagactggctgccggcaaagccctgagccacattcatctgggccttgttaggacaacagggacggtgcggggtgggggggttgcggggcgcaggaccacgtcagtggagggagggaggccgatatcggtgcccaggctgggcccaggggccagcgggtcctcacctggcttgtggctgcccctgttaggcagcccggatggaggggctcttccagccctgctggccccgggaatgcagggactcaactccccctggtctcagtggctcttccgggagcaacacagcctgcccgagtcgacaccacccctcgggtttgagtcccttctgtctacccctacccccgccagggcactgcccccttgcccggaagaggcagcggcacccccagccccttggggaggatgccctgccggccccacactcggtggatgggcattttggggctaggatttaatgggggtgaccctgcccgacccctctatgttggttccacggcgtcagaagaaagctgttattaacccagcttattttctacaagtcttgtttattgaaaggatctgaaaagcgtaataaggctttcaatgacatttaatacattttcaagaaattaatatgaaacattaaaatttacttcaaaaatccaaagttttctagatcattcccatctcacgctgctttagaggtcagttcacaccttctgtgttcagatgagcggctggaattctgaacactgccgtcttccagccctaacgctgggcgctggtccctctctcctaagcccacggctgggcttcccctgtgcccagggtcatggcggacttcaagccaggccggctgcccagaatcacactcagggtttttggacgctcaagtccacagatgctgaggtgcccagacgagggtgagcagggagacacatgcctcggagaacgtgcccaggctgggccaggcggctgcgggaagctcctcacgggcagaggagaacgtcttgtgccttccttatcgatctccagcagatgagggcaactttgtgtgcaaaactcagagagcagttactcaaaaaaaagacacccgggcagcagtaaccaggacaccagggtccgaccacggcctccacacacctgtgcccgtggaagacgcgggcgccggggtaggcagcatccacgtgctccacagctgctggtgctgggcaggctggagactcacgggagaggcaggaggagaatcagcgtgttgagtccctcgctgtgttagtgtgaaaaattctcattacagttgcaaataaaagggatcacgatcactagccccggaaaccctcatctcccggaccatcaggatcgcactgaacagaatggtcccctaatggtccctgaggacagcgtcttgcagaacataaatgtaaacattgaatggcagacgactcccttccccttgaaatcttcacaaaagtgtgtacgagaaagtatgtacatcagcacttcagaaaaggggcccacaggacgtgtgcggggtgtgcagggtgtgcggggtgtgcggggtgtttgagggtccggatgtgcgtcccgaggtcggagggttggacgcccctgtgtccagttgttgggaggggtgggaggcctcgccctgctgttcagccccttcccctccactgggccgcgttcccagggacgtgcaacagggcgctcaggttaggagacccgaaaccacaggcagacaggacccgccacgcccgctcccagccctgggcacccccacccccgtttccttccagtccattttccgcggcagtttttggtcctggggaccgtcaccgatgcctcccacgcacgctttcttccctgaagggagacgtcgctgcgctgggcctctcggcggtcccccccacccgggtcccgggcccactggccccccgcagacgccgctacacgctgactccagccaggctgcgctgggaccacttcaacctcacctacaggtgcgccctggctgggccccgggggagggggcgcggccggcgcccgctgagctcactctccctgcaggatcctctccttcccgcggaacctgctgagcccgcgggagacgcggcgggccctagctgccgccttccgcatgtggagcgacgtgtcccccttcagcttccgcgaggtggcccccgagcagcccagcgacctccggataggtgggcgcccgcccccgccccggcccggccctgcgcgcccggcctctcagccccgtgctccccccaggcttctacccgatcaaccacacggactgcctggtctccgcgctgcaccactgcttcgacggccccacgggggagctggcccacgccttcttccccccgcacggcggcatccacttcgacgacagcgagtactgggtcctgggccccacgcgctacagctggaagaaaggtgaccgtccaggctggcctcctggaggcctctcctctgcagcacagtgggctgccgcggtcgggctttggggcagacggcaggagggaccttccggggtggtggctgccactggagtctagcaggcaaggaggggagcccgtgggagcccccatcccggcagccctgaactccctttcccatccccctgcgcctctggagcgggagctggagctgcattcctgggggccgagctcaccgcctgggcccagaacattcttatctttccgtggctgcggccgagggcggctccgcggctgcgctccagcagatacaccgggcctcggggagctggcccacgggcggcggggctgggcccggggctcccaggcgctgacccccggggcccgcaggcgtgtggctcacggacctggtgcacgtggcggcccacgagatcggccacgcgctgggcctgatgcactcacaacacggccgggcgctcatgcacctgaacgccacgctgcgcggctggaaggcgttgtcccaggacgagctgtgggggctgcaccggctctacggtgagtccctttgtcgggcgggagggcggggaccgggcggtcctgagccaggccgtgctccccacgctcccgacaggatgcctcgacaggctgttcgtgtgcgcgtcctgggcgcggaggggcttctgcgacgctcgccggcggctcatgaagaggctctgccccagcagctgcgacttctgctacggtgatgcccacggggccgggacagggctgcgtgggagctgggccttggccatggtcggggctgagggggcactgacggggctctttcccccacccggagcagaattccccttccccacggtggccaccaccccaccgccccccaggaccaaaaccaggctggtgcccgagggcaggaacgtgaccttccgctgcggccagaagatcctccacaagaaagggaaagtgtagtgagtgagcgccccgggcggtcctcggggtgggcagcccgcgggcggccttggggcaggggtgcggggcaggcagcgggggggggctgtgcctgcaggagacgccccgcccccctgcagctggtacaaggaccaggagcccctggagttctcctaccccggctacctggccctgggcgaggcgcacctgagcatcatcgccaacgccgtcaatgagggcacctacacctgcgtggtgcgccgccagcagcgcgtgctgaccacctactcctggcgagtccgtgtgcggggctgagcccggctgataaagcactttctctctgatggctcctcgctcattcttgggagggcagcgggcagccagtctgggcaggtggacaccccagcccctggtccaccgagagctgggcgtcctcggggctgggcacccctgcttccccgcacagcggaccacaggtacagcacaggacgggacgggctttgctaaggtggcccctgggaaagtgggataagaggaggccccagtgacaggggcagcacgtggagcagcacctggggtagccccagaagcctgggttctgtctaggacttgctcagagctgggggagggaggcaaagggggcttcctgaaagatgtggctgggatgggcctccaggatcttctgcaaggagatgtgggtgggggctgggaggactggcacagggtgggggaccaccttgccagagtggaggccccccaggaggtaggagctcccctcctgcctggggaagacactggcccacatggggtcagaggccacagccgcccaccccaccctcttcccctagagcccggtggtctgcgactcccctcccacacatggtcccgggtcactcaaaggacgacacggggagctttcctcgaagaatattttaatacattttaaaactcaacaaccttgtataaaaacctgtcgagtctgctggcacagctggggctgggggttgggggccgggggcctgtgtggacagggctggtctggacgagtgggttggggcaagagggcatcgctcatcccaacacagaaacaggtctccagctccgaagattaaacaatccacccggctcccaccagttcctttccaaatcacggcccagccagccccgtgcgtgtcgagagtgggagagggtgtgtggaggtttgtgctgccccacgtgggcacccgaagatgccctggcaagtcacggagaaaacacagctctttcctccacaacaaggaaaatgatttaattctacaaatttacaaaccaaaatacaaaaacaaaacatggagcacaaagtaagacgaggagttccgagtctcatcgcagctccagccgcagtagccacgcctgtggtcccggctgagttctccccatgacggggtccactctgaccttcagaacttgaggctgaagccggggcccgcggcagaggccccctggttcgtggtggtaaggtggaagcccgtctccttcaggtcgtcgtcaccctgggacgagtcggctaccgtgagaaccctgcccaagccagccccacctgtgggcacgccccacccgccaggcccctcaccagctggctgtagcccaggcctccctcagggggcctcgggctggtgccccgcttcacacgctgctgctcgctcttggcgggccacgtggggaacatggaggggtcgatggggaggggggtctcgcggaaatactcatgcttgaggccgtcctcagcgctgatcctcctcccggggaagtaggtcaggaacctggggggagagggccagaggcccaggaggtgctcgtgtgctccactgggtcccccaaagatgggctgtgttgggacggggctcagggcatgggacgccaggcaccagagcagttctggaacgtggtgagccagcaggtaggcctgggactgggaagtcaccgctatggctcgggacctcccgccacccggctgcactgggctcacttgttcatgaggtcgaagccctggtctgagagcagagccccgaagcgcttgcggaggttgttgtaggggtgctcgctgaaggtcatctttttgactactgggagctcactgtagccgggccagattttctcactgggggtccccagctcctgaaagacagaggtgcttcaacagccacaccaagtggcccacagtgttggcacctgtgtcccgtcagagaagacaagccaccaggagggctctcagtggccctggtccccatctcaacccagcacctgtgcgccccgcagccccattcctgcaactcctctgaaatccatagcgcacctgcggcagggccagacccaccttgaacactttgttgatctgatcgatttccgaattcccggggaacagaggcttctgagtcagcagctccccgaagatgcagcccactgaccacatgtccacggccgtggagtattcctaagacgccaggagaggtgttcaggaaggccagtgcccgcgaagctgtgggaggctgcatgggggacaggggaggcactcagacgcccaggactcaccttggcaccaagcagcagctctggggcgcggtaccactgggtcaccacgaccggggtgtaggccttcagaggggatccgtactcccgcgccagcccaaaatcacccacctgcaacgacagatgggcggctgtgggtgggcctgggcgggtcaccctgggatgggccactcggaggggggctcaccttgaggatgccggcgtggctcagcagcaggttggacgtcttgaggtcacggtgcaggatccagttgtcgtgcaggtgtttcaccccccgcagcagctggatcatcagggtcttcacctcccctgggagggagggaggctcccatgtggacccggccgccccaagcccagggcactcagggtggcccgctcgcctcggcagcaacagaggcttctcagggctttccctgtggatgcagctggccctccctgcagcactgtcaccgcgggggtgaccaggacactgcccccacttgtacgcagacaggaccccggggcgcggctgtacctggcaggaagggctgtttcatggtctccatcaggctcttgaggtcgtgctccacgtagttcatcacgatgtagatcttgtccatgttgctgcccaccacaatctcctgcagggcacggctctgtgggtgctgggcacctccaggcccccacccacccctgcacccgggcgcagatgctgagggacagtaaggacctccggtgccacccgggaggcaaatacttgcttctgtgtggtctgtgaagggctccactaagtgcaggagagtgtaggaagcacccggccccaggacagcacggggccctgtcggaaaagccttccacccggggccaggcgtggtggggccatgctcactctaacggtgacaatgttgggatgctgggccttgaggatggtgttgatctccctcagggacgtgatcgggaagccctccttctccttctccatcttcagccgctttagagccacaatttcatctgtgaagaaaatacagacggcactgagaggcattctcaaagtcacggtaccaacagtggactcgttcagtgaggaccgcaggcagtgcccaaagcgccagcatttcacggaggggggtctcgttctaggtgggggcacgtgggcaccaggagaacgccccagctgaggtctcggcaacacccacggcttcccactcaacacaccacagacactcacagccacctacagccacctgggatcccagcggccacgccgactccacatcgacttccccaacagagccggcctcacctgggatcccagtggccgactcccaacagagttcccggctcacacacctgcttgggtgggacgctgggaacgcaaacctgcacaccagccccggcacagaccactccacgcgctgggcctcggccctgtggggcaggccgcctgctactgcaagggagtggcaaagccccagggccaggctgacctctggcttctagaggtgctgaggggtccaacctccagtagctgctcaggtgaagcgggcccaggtgcagtcgcagctctcgggcagccagcccctgccccacttcccctgcctttgtggggtgaggggaccccacccacctgttttcttgtcttttgctctgtagaccactccataggtgccctcctcgatcctgttcaggcactggaactcctcgacgctccggcagccctgggaaggaagcgcctgtgtgaggtctcagtggccatgccagctggagggagggcggctgcgtccacaggcacggcacacccagcacggggcaggtgcagggcagagccttgggactgggccgggggtggagctgggagcagctcagttctttcaaagtctctttccttgcaaaaccatctgacactttattatgaaacaaaaccagtgtgaacaaaaggccatcccagccaggtgcaagggctcaggcctgtaattccagcactttgggagggcaaggcaggaggattgcttgagcccaggagttcaagaccagcctggccaacatagcaacactctgttttctttttttctttttgagatggagtctcgctctgtcacccaggctggagtgcaatggtgagatctcggctcactgcaacctccacctcctgggttcaggcgattctcctgcctcagcctccctagtagctgggagtataggtacgcaccaccacgccaggctaatttttgtatttttagtagagacaggatttcaccatattggccaggctggtctcgaactcctgacctctgatccgcccaccgcctcggcctcccaaagtgctgggattacaggcgtgagccactgtgcctggccaaaactcttctctacaaaataaaaaaattagccaggcatggtggcttgcgcctgtagttccagctactcaggaggctgagatgggaggattgtttgagcctgggaggtggaggctccagtgagctatgattaagccactccactccagcctggatgacagagacagacccagtctccaaaaaaaaggccatccggagagtctctctgtcaaagtggatgtgtcccctgcttgtaccaggatgacactgaggacgggccctacctgccaggcgcagcatgatgccccatgccagggcacctacccctcggtgtaccttggggccggtgcccaggccggatgtcacgtactctgggtggcctgtggcccgacgcctacgctcagcagcactaaggggcagaggcgctcacaaggcatagggcagtcgacagaggcctgctgcatgcgccagagagaacctctccgcccacaggcaccaaggagggggccgagtccctgccggtctcccaggcccccgaggccactggtaccttctcaggcttgtcccttccaaatcactcccaacaatatcctgccttattgatagctgcctgagcaaaaggcttctggtcacacatctacactgactcccgtagccgctcccccatccaagccctgcacagatgccggtaacaaggccttggtgcctacataacccgcccacgcaggggtcaagtggaaggcactgctctccagtgcggaggaggacgcaactcgggcagcagtgacagcagcgcggccgcacgcccaggctgcctttcaagccgcagagcagtcctgcgggcagctccctgtccacccagttccgtccagcatgagaaagaggcgggacctagaagcatgaggggccagtggctgtgcccgcccgtcactgccccagtgggcccagcagccctgtgaggcgacagacgccaacacgggggccaggcttcgctcagcccctgtggtaactccgactgccaatgcggacagcggcccggggcgaggggagggcctgacctgcagggccggcaggtacttgggcagctcctgcttgagctcgatgggcaacagggcaggggagtcgggcacatagtcgccctctgtcagggcgctgctctgcggcgttccctcacccacttcttcctctgcttcttcactctccccggaatctcggtcgaaccgtgactctggaactggaaaagttgaacctaattacgaagctaggagtaagtaaggatcatgaacctcctcctgccccgggggcatcaagcgcgtggcagggctgccccgtgtcccgctgggaggtgctggcgctgggctctcgtcccctggacacagggcaccgaggcctaagagtgctggcaggctcggctgagacagagcccggatgctgagctgggaggaggcgtcgggtgtcatgtgggggacaagcccacatccacgtccaccaggctgaggacataacctcactgcctgtcggaggctgggccaggcctctgttctgcagggacaggcccggagccaccatctgacgggcctcccctgtggggaactggtcctgggcttcccagctcctcggccctgctgggcactcaggacgcccttggtcagcactgtgcctcgctgaggaatgcgggccccaccggcacagcctggagcggccaacgaatcaggcggcctcccagaccctggcgtgccccacgccgcgcaggaccggctgtcttaggagagggctgctgcactcggagacagacaaggagggggctctgtctccagggaggttcttaccaaccaagaggtggttttcattttctcgttcttcatcttcactcatttcttcctcacttacttcttctgcaagagaaaggaggcgtctgctcagaccagcaccggggcgagtgctgccacaggcaggatgcgggctccgcttcagctaagcaacaagtgttcccaagaatggatatggaggctgggcgcggtggctcacgcctgtaatcccagtgctttgggaggccgaggcgggtggatcacctgaggtcaggagttcgagaccatcctggccaacgtggtgaaaccccgtctcgactaaaaatacaaaaattatccgggcgtggtggcgcacacctgtactcccagctacttgggaggctgaggcgggaggatcacttgaacccgggaggcagaggttgcagtgagccgagatcatgccactgcactccagcctgggcaacagatcaagattccatctcaaaaaaacaaacaaaaagaatcgatgtggaggtgtcccgagagagtcctagatagaagggagtttcaactcccccgcccgccagctacttctctgcggtttctaacactatagtgaagtcacaacacctcacacagtcgtcgcggtgcctcaccggcagactgctctgatgcctcctcagagttgctgccggtctcctcctcctcctcttcctcttcctcctcctcctcctctgattcttcactggtgctcccttcctcctcctcctcttcctcctcctcctcttcttcctcagaacctgagcctgattccgctgtagaaagacagcagagcagagggtgaacctgggccttcctgggcagcagtggtcaaggccttggccaggcggttccaggtacctgacgaggactcggccgagctggtcttcctctcgctgtcgctgatgtcctgtaagtcggacagcaggtccctttcttccattttctcttcttttacttatgagataaaccataaaggtgaatttggggaaatgtttttaaacaaacaagctaccaccaccccaaaactagtgcctttcacgtaacgattaactttgcttggtcggaaaccagctcatccacagacgctggaagccacttctctaacggggccagtggcgaatgtcccagcggataaacacacgtcctgtgtcctggccgcacacagacactcacggtccctctcacgacacgagaggacttcagccagcacatctctcactttcttctgaagcggttacttagctgggctttaaatgaatcctacacacttatgccaaacatcccccagaaaagactcacactgtgctggcttctgcgcaggcgccggcctggcctcacctggcttccggccgtctcccaactcgaaccgctcccgcggcggccgaggcgggctgcgactccagtggctggctttcactttgtcgctgtagtcctctctcatcgttcggtgatgtgcagacactggcgcgcagggcagagagggagatggcactagcagcactgccttcctcaaaaggccccacccggcacagctgcctcgtctcccacacccgcacctggcagacacacccacagcgtgcacagggtgctgacagcatcggggtcagaggccagaggtctcccaggaagcccagggagaaaaagctccaacctggaggccgtgagcccgaggacccaggtggaccttctagactgatcttcactggtcaaaaaggaaggggcgggagaagattctggaaagatggagtaggaagcactgggaatcagtctccccaccgagacaacacttgcatcacaggatcaggcctgtgcaactactgaggtgctctggagtctactgaaggtttgcaacttcagggggaatcttggagagtaaactgtgattcattaatcaacgtcaccgcttcgcacattagtggctcccacctcactccccgctggcaggcagcagcctgcatgcagctcgccggacccaggtgggcagacggacacacacacccgaggtcagtgtgatgactgcgtgtcccaccccagaggcatgaagaggcagcagccacggccacccccaagctgaaggtacttccagggcatgagcaccacgtcccccgttgcccccttcatttctctctattccccctttaggaggcagacacttcaggacaagaacattaaaaacatctgtattgacgggaacgttaaaaagtggctgcacgtgaccaggaaaaggctcaggctcagaaaagacccgtgaagaccctgagtttccacaacaggccgaccccacagacacagcccagcacaaccaaaacaacaagtgcacacccttgagtggggaccaggaagaatcacatcatgagaatcaaatgtccatttttttgactaagaaaaacacaagagaaacaaagaaacaggacagtatgtcccattcagaggggaaaaaaagaagccaacagacacggttcctgaaaatcacctgacggtagatgtcccagacaaagattttagggaactgtcttaaaccttcagttcctcagagaacgaaaggaagatgtggagaaagtcaagaaaatgacgcgtgaacacgacggaaatatcaacagagacagaagatccaacaagaaaccagagagaaattccagagctaataagtacatgctcacaatagacactaaaaagtaaatattcacaacagaaactcacaggcagatgtgagcaggcagaagaaataatcggtgagcctgaagacaataaaatcacatcgtctgaggaaaagaaagcagaagagactgaagaaaagggagcagtgctgagcggcctcggggaccccaacagatctgtgggagcccaggagggaggagaggagcagagagggtatctgaagaattcctcaaaacccccacattggatgaaaaccgtaaatataaacattagagaggctcagtgaactccaggtagaatgaagtcaagaggcccacaggaaaacccattattaaacagttgaaagcctaaggcaaagagaatcttcaaagcatccaagggatcctcaattaggtcatcagattaaagcatccaagggatcctctataagatcatcagatttctcatcagaaactttggaggccagaagacaatgggctgaaatagtccaagtgaaaaggaaaaactgtcagctaggcatgagggttccttgagcccaggaattcaagaccagcctgggcaatacagggacaccttgtttctactgaaaaatgagccaggtgtggtggcacacgctacgcctgtaggtcccagctacgcgggaggctgaggtgggaagatcacttgtgcccaggagttcgaggttgcagtgagctatgatcgctccactgcactccagcctgggcaacagaagaagactctgtctcaaaacaacaacaacaaaattgtcaaccaagaaccacgtatccagcaaactttccttcaaagatgagggagaaatgaggatattctcagataaacaaaagcagagggagttcattactactagacctagacctgccttgaagaataagctccagggagttgtgtggggtgtaaggaaaggacgcgagacagaaaccggaagctgggtgaagaaataaagatctccattaaggtgaggacgtgggtgactataaaagctcgtactggccggccgcggtggctcacgcctgtaatcgcagcactgtgggaggccgaggtgggtggatcacgaggccaagagatcaagagactattctggctaacacggtgaaaccctgtctctactaaaaatataaaaaaatagctgaacatggtggcgggtgcctgtaatccctgctactccggaggctgaggcaggaggatcacttgaacccggggggcagagggtgcagtgagccgagatcgcgccaccgcactccagcctgggggacaagagcaaaactctgcctccaaaaaaaaaaaaaaaggcaggggcgaaaagcaagcaccggaaccaagcgcccgcctgtgacagcaagtgcccagcaccagggggcagcagacacgcgtcccgccgagcacagctgcccaccgcgccgcctaccttccctgcgggcctcccgctccttgcgccgctcctccgcccgccgctcgcgctccttctgctcccgctgctccttctgctgctcccgcatcttgcgctcccgctcccgcttcctttctaactgctccaagcggtccctgaagaggcacacgccatcattccccctaaacagaagcttgcttatcgcgtttttgtccacatttgtaagctggctttctacgtaattcaatccgtgaagtttttttttcatttttttattttattttctttgagacggagtcttcatctgtcccccaggctggagtgcggtggcgcgatctcggctcactgcaacctccgcctcccgggttcgagcgattctcctgcctcagcctcccgagtagctgggattacaggcgtgcgccctgtactcccagctaatttttgtatttttagtagagacgagggtttcaccatgttagccaggatggtctcaatctcctgacctcgtgatccgcctgcctccgcttttcaaagtgctgggtttacaggcccgagccaccgtgcccagctgccatttccaattctaattaataaatgatccatttctttccattcgatcggtgtttgcttcatggattttgggctctgtggttagatgcattcacatgtatcattgctgtatcttcctgctgtattggcctgtttctggctgtgaagtccttgctccttcttgtttctagctttttttttttttttgagacagggtcttggtttgtcacccaggctggagtgcagtggcgcaatctcggctcactgcaacctccatctcacgagttcaagtgattctcatacctgagcctcccgagtagctgggattacaggtgtgcaccaccacacccaggtgatttttgtatttttactagagacagggtttcaccatgttggccaggctggtttctaatatttcttaacatctgttttgtctggtatgagtacagccattcaagctctcctatgacagctgatgtttgtacgctgcgtcttttcctgttctctagcagacagcatacagttagatcttgtttttctatctgataatctgccctgtctgtttggggcacagagacctttcacatgtcatataattacacgtacagttggatttactttccttgctttgttgtgtcttttttattcttccctttttgattttaaattacatacgtttagcataccattttaatttatttgtactttttagaacactaagaaaacaactttcttagtggttgctctagggatcaccatatgcctcatgatactagctcaagtccagtacaatataaaactgttgtaacacagcttcattccctgtcttctttgtgcagtccatttatgccacataccacgacaacagtgtaattattttacacaatcgtagttccagtaaaacctaagatgtgaggagagatatttacaggatattgacgtcaacctacacttgctatctgcagtgcctgtccttccttcctgaggattcaagttaccgtctggtgtcatttctattcaacttgaaggtcttcctttagtatttcctttaaggcaggtttcgccaacaatgaatcccaccagtctctgcttctcagggaatgtcgttcgttccctttcacttgtgtagaacagttttgattcctggctgatggttcttctctctaagcagcttgagtatgccactccactgccttctggcctccattgtttctaagaagtcagtggctggcggtattgaagctcccctttcatgggatgggtcattcttctctgagccctttcaacattttctctttggcctttgccagtttgactatgatgtgactttgcatttattctagttcaaacttcctgtgctcttgaatgtgcatattttttaattaaaatttggaaagtttttaaccattattgtaacaaatatctttcctctctcctggaacccccattcgacgtgctttggtacagcagatgttgtaccacgggtttctgaggctctgtgcatttttcttgtttttttctctctgttcttcagaatggataatttctactgctccatccacaagttgtttccaagcctttactaaattcaacatctggacactcaagacagtttctactgatgatgttcttcctcagtacgggtcacactgtcatacttctttgtattttagataatacatttgtagcaattctggattctaagttttccctttcgttgttaccaccaaggcctgtctggttgtccgtgaaatccatctccctcatagctcatggccaccccgttccttcccacatgcctattttaattttcaaccttggcttcctaggggtcaccaccatggctgcacagcttagcaattagccagcactggaaaaaggctgggctcaaatacctcgagcacagtaaggcttccttggcccacggctgtgtgtggacagggagcacactgaacgttcaggcgtcattcgcatctgtggcggcttctattttctgctaggtcctttcacgcagctgcatcctcagggctggtcacaagtgggtggcggctcgagctctctccagtctctgctgcacgtctttggcgggatcacagctgctcccaaccacactgtacttcattctagcagacctcttggccttttcctccctccactgaggatgctggtgggcaaggccactgcccactgctctaaacggagtaaccccttccaaggcagcaaggaaactgcaggtcctgcagctgccctgtcccagtggaacctccgtgcttccaagtgcagagtggaagcagtaaagggagcagctctcaggccagaaggtcagattcttactgcttttacccacagctcagcagttttccaagcatcagtgcttctcagattatccttatcagtttcctttttgtcagagacaaggtctctctacgttgcccaggctggcgtcatgcggtcctctggccttagcctcccacgtagcatatgctaccacacccagttctggattggctgatctgaatcggccctacccagaagtctgcccccaacaatttttgttcattcactctcctgtctttaccttctgggaaatcaatatgacagcccaaatttcatctaccaacctccacttctatcccaagctctactctcgtgggacaagacacactcaatgtctggcacagggcgtggcatacatgaatgtttcacacactaacaggaactaggccaactgaaaccttgctcacccagcagcggtctcggaccttgacccctgggcctcagtgtctcccacacccttcggcatcaacaagaaccagcgccctctcatcatctttacatgctgtgtacccagccctggctgctggcaaacatcgctgcacacgcccttccgcttcagactcctctcttcctggagcagcttgcaagctttctgtggactcactctgaaggcggagatgggcctgctcgcacctggcctacagcctttttcctggttcacagaacagatctggggctacaccgatgttctttcttgggaatctggctcataaaggggaacgaatatacagactaatggccaggagtcctaggagtccagtgtcccgatttccagactgtttcaaggtttttgggatctcccttctcctttttttgagacagtctcactctgtcaaccaggctggagtgcagtagcatggtcatagcttactgcagccttgacctcccaggctcaagggatccaaccacctcagcctcgtaagtgctggaattctagcgtgagccactgcgcccggcgggacgtgcagatttctgatcccttcattgtcttccctcaatcaaatcacacccgttcttacttccagatgcagtgaaaactcactccctcaggacagttctcttggtcagcctcgtccagcgttcactgtgctgtttccatgtctaccacttctgcaacaaatgtgacttctattgccaaattcttcttcattgctgtgacaggacacactaccacggccctttcataaagtcctcaactgacccagcccactcacctttctctcctggaatgctcccttgccatttcccttctcttctgtctttcccattcccggcgagctttatcctgttcttctcgatgtcgtttccgacgttcgtgctctctttctttcactctagcatgcttccctaatgagaaataaagtgtcatgcaaagaaacctcacttcaaaaatttcacgaggccgggcacggtggcttacgcctgtaatcccagcactttgggaggccgaggcgggtggatcacctgaggtcaggagttcaaaaccagcctggccaacatggtgaaaccccgtctctactaaaaatacaaaaattagctgggcgtggtggcaggcacctgtaatcccaggtactaagggaggctgaggctgtagaatcacttgaacctgggaggtggaggttgcggtgagccgagatcgtgccactgcactccagcctgggcgaaaaagtgagactccatctcaaaaaaaaaaaaaaaaaaaaaaaaaaaaaaaaaaaaaatcacatgaaaatgaaattaaatcaagaacattaaatatttaaataatgatgttaagtaatcctaatctttttttttttttttttgaagagacagggtctcactatattggccaagctggtcttgaactcctgggctcaagtgatcctccatccttgtcctcccaaagtgctgggattacaggcctgggccactgcacccagtcgaataatcatgattttatgttaaataaaaaactttgaaaatagaaaactatctgcagtaagcgtctaattatgaagaaagaagaaaaaagaaaaacaattctgctatcacagaagagaattgtaatattcatcttttaaaaattttctatactgaataaactataattatcagttttataatacaaaaaccactcttcacaaagactacagaacaaagctttgctatcagtgggcttctccactgtgcaatgaagccacattaattaatcaagcgtatttataataatgagatttcaatcgggctccaggtccaattttcctaacacccgtaagaatctcctgatgttggtacgagatcaaactgctcaagcctaacccattctttggacttgagcaaatacccattttggggtgtgtttttctcctatacttgttgaattcaggtcattttaaatgtaaacaaactgctcccaaacaatataatgggggagagaaaaccccagaggaaaaatggactagccattctgaatggtctgtgacacacgcacgctttcagctagagtttgctctctctggttttcggtctgtgacacacgcatgctttcagctagagtttgctctctctggttttcggtctgtgacacacgcacactttcagctggagtatcctctctatagcccctctgaacggtctgtgacacacgcatgctttcagctagagtttgctctctctggttttcggtctgtgacacacgcacgctttcagctagagtatcctctctatagcccctctgaacggtctgtgacacacgcatgctttcagctagagtttgctctctctggttttcagtctgtgacacatgcatgctttcagctagagtattctctctatagcccttctgaatggtctgtgacacacgcatgctttcagctggagtttgctctgtctggttttcggtctgtgacacacgcatgcttttagctagtttgctctctatagcccttctgaatggtctgtgacacacgcacgctttcagctagagtttgctctttctggttttcggtctgtgacacacgcatgctttcagctagagtttgctctctctggttttcggtctgtgacacacgcatgctttcagctagggtattctctctatagcccttctgaatggtctgtgacacacgcatgctttcaggtggagtttgctctctctggttttcggtctgtgacacacgcatgctttcagctagagtattctctctatagcccctctgaacggtctgtgacacacgcatgctttcagctggagtttgctctctctggttttcggtctgtgacacacgcaggcttttagctagagtttgctctccatagcccttctgaatggtctgtgacacacgcacgctttcagctagagtttgctctctctggttttcggtctgtgatacacgcacgctttcagctagagtttgctctctctggttttcggtctgtgacacacgcacgctttcagctagagtattctctctatagccattctgaacggtctgtgacgcacgtatgctttcagctagagtattcttttttttttttttgagacggagtcttgctctgtcgcccaggctagagtgtgcagtggtgcgatagcggctcactgcaagctccgcctcccaggttcatgccattctcctgcctcagcctccagagcagctgggactacaggtgcccgccaccacgcccggctaattttttgtatttttagtagagactgggtttcaccgtgttagccaggatggtcttgatctcctgaccttgtgatccacccgcctcagcctcccaaagtgctgggattacaggcttgagccaccacgcccggccttcagctagagtattctctctatagcccttctgaatggtctgtgacacacgcatgctttcagctagagtttgctctctctatagcccttctgaatggcctgtgacacacgcatgctttcagctagtttgctctctctggttttcggtctgtgacgcacacatgctttcagctagagtttgctctctatagcccctctgaatggtctgtgacacatgcatgctttcagctattctctctatagcccttctgaacggtctgtgacaccattatgctttcagctacagtttgctttctctggtttttcagtggtgctctggggaaggcagaagagtaggaacaggaaagaaaccacacttgaacatgatgtcaaagaaagtaaatgcttctgtacccccttctgctgaatggctatgatgcctacatttttcttttctcttttcatcttttctgtgatgaactttttctttccgagacatttgctggggtggtttgatggccaaagaatcatcttcttctcctctgaaataaaacacaacagcactgcgtcatgcttgagaaagtgcggaaaagcatcaggctattatgaggttttttcaacccagaaaaatgcatgattcagataggaacgaagctgaaacatcatttaaaaaattacattaattctccaacttcaggcatctttttttttttttttttttagacggagtctcgctctgtcacccaggctggagtgtagacacgcgatctcggatcactgcaacctccacctttccgggttcacaccattctcctgcctcagcctccggagtagctgggactacaggcacccgccaccacacccagctaatttttgtatttttagtagagacggggtttcactgtgttagccaagatggtctcaatctcctaacctggtgatctgcctgcctcggcttcccaaagtgctgggattacaggcgtgagccaccgcgcccggcctaggagtcttaagattcagatgaaaaatgtaagaaatcaatgttttgtgcagatggaacgaaatgcctctcagaggacctgcagggggtgaggggcaggttcattagcttgactgtggtgacagtttcaggggcatgtaaaaatacatcacatcttatttatttaatttaattttatttatttatttattttatttgagattggagtcttgctctgtcgcccaggctggagggcagtggcgagactctcggctcactacaagctctacctcctgggttcatgccattctcctgcctcagccttccaagtaactgggactacaggcgcccaccaccacgcccggctaattttttttgtattttttagtagagacggagtttcactgtgttagccagggtggtctcgatctcctgaccttgtgatctgcccgcctcagcctcccaaagtgctgggattacaggtgtgagccgccacgcccggcctgtatttatttttttgagatggagtctcgctctgttgcccaggctggagtccagcggcgcaatcttggctcactgcaacctctgcctcctgtcccaggttcgagcaattctcctgcctcagcctccggagtagctgggagtacaggcgtgcgctaccacacccagctaatttttatatttttagtagagacggggtttcaccatattggtcaggctgatctgaaactcatgacctcatgatccacccgcctcagcctcccaaagtgctgggattacaggcatgagccatcgcacccggacttattatttttttcagacagaatcttgctatgtcccccagggtagaatacagaggcacaatcttggctcactgcaacctttgcctcccacattcaagcaattctcctgcctcagcctcctgagtagctgggactacaggtgtacaccaccatgccaggctaatttttgtatttgtagtagagacaggctttcaccagtaaccctaggaaagagtaaacctcaatagttgtaacagcatgccctgtcacagtaatcctaggtcgtggctcgcacctgtaatcccagcattttgggaggccgaggtggacggatcaccaggtcagaagatcgagaccatcctggctaattttttgtatttttagtagagacggggtttcaccgtgttagccaggaggctgaggcaggagaatggtgtgaaccagggaggcggagcttgcagtgagccgagatggcgccactgcactccagcctgggtgagcaagactcttgagacaccgtctcaaaaaaaaaaagagtacacttcagtatttacaacagcacactgagcacactgtcacagtaaccctaggaaagagtaaaccttaatagttacaatagcacaccccgtcacgtaaccctagggaagagtaaacctcaatagttaaaacagcacaccccgtcacagtagccctaggaaagagtaaacctcaatagttacaacagcacaccctgtcacggtaaccttaggaaagagtaatctcagtagtacaacagctacaacacgccctgtcacggtaactctaggaaagagtaaaccttaatagttacaatagcacacagttgtcacagtgaccctaggaaggactggccaggccagggctgtgtacagttgggtcttgcacatctgtacatccgctcacctgtcttccattgagtcttctcttctatacggggagttccttattgtgatctccatgcagtgatctctcagctccccctcctcaagggaatcccgcttggaatcccggtcatcagactaagaagcaaagagaaagttaatcattttctttataagtttttttttcttcatagataaaagtatttttaatgataatcaaacctgggcaacatcccaaaacaaactttcacatgtactctgaatgagccagtgttataaaatataaagaatttttggccaggtgcagtggctcacgcttgttaatcccagcactttgggaggccgaggcgggtggatcacgaggtcaggacattaagaccatcctggctaacacggagagaccccatctctactaaaaatacaaaaaattagcttggcatgttggtgagcccctgtagtcccagctactcaggaagctgaggtaggagaatggtgtgaacctggccctgggcgacagtgcgagattccgtctcaaaaacaaaaaaaaagctaacaaagtgagcacatgctattggaaaaatactcaaagcagagttgctacaaacctttaatttggaaaaatttcaatatctgtgaagcataataaagtgaagtgcaaggtatgcctgtactcactaacatcccaaatgatgctacaaatcttagcaaaagaggtactttgccaatgcctcttaccaaattactaaaaaggtttcctgagtacattaccatgcaaaccaagaaagacgtaaaatatttatattaatttcaaggcaagttcccactatattaaaaatacttagagatagtattatgaatatactaataatgaaccgagaaaaattagtccagttttgctaatgacttaacattcaacgtattttattctccatgtatgctcaatctagacacagctttagtgtgttaaatctgcctttaatgtcaactgaatattagaatacattttgggctcacctgcgacatttggaagtacaaaagaacttcaccgaagaagcgttgttctaatggaaaaatgagggcaaagaaattaaatctcctttaagaaaaccacttacttaaaaaaatatggcttacattttttaagcgttttatctctgctttctcctcttgttccttccttcgtttcttttcctgaagaatttcatctaaagttttcactttccaagagtccttttcatcacccatttgagttaaaacactgcaaaaagaaaaataattcagcctacatcaggacacagcaagctatggtgctgaacacttgaacctagtcacttttgagggattcagaataaatcctcattaagaataagaagttgtgcccggcgcagtggctcaagacggtaaccctagcactttgggaggccgaggcgagcagatcgctggagttccggagttcaacaccagcccgggcaacatggcaaaacctcgtctctacaaaaaatacaaaagttagcccagtgtggtggcgcgtgcctgtattcctagctacaggaaggaggctgctagaggcaggaggatcacttgaatcagagaggtcaaggctgcaatgagccaagactgcgccactgcactccagcctagataacaaagtaagacttggttaaaaaaaaaaaaaaaaaaaggtaagctctaggctgaggcgggtggatcacaaggtcgggaggtcaagaccagcctggccaacacggcgaaaaccctgtctccactaaaaatacaaaacttagctgggcgtggtggcgggtgcctgtaatcccagctactcgggaggccgaggcagcagaatcgcttgaatccgaaaggcggaggttccggtgagccgaggtcgcgtcactgcactccagcaagaccccgtctcaaaaaaaaaaaaaaaaaaaaaaaaaaaaaaaaaaacaagaatgataagttgtaagccaggcaaggtggcgagcgcctgtagtcccatatactctgcaagctgagatgggagaccgattgagcccaggagttccaggctgaagtgcgcttgtgaacagccactgcgctgcagcatgggcgacaaaaaagagtgatgggttctgaaaaatgaccgcttgaaatcaagtctcgtttctgtcattcttgtatggtcttgggtaacgtaattcacctcagttcagtcttccgtacaaccagaataacaacacctacgtgatagtatcgatcgcggattaaagatcatccgtttaaaggctcttaactcaggacctgccactcatcaaacactgcttttactgtcagaatctgctagaaagaccgcttggactacgtgaagccactagcacactggacagctgcaccttgagaccggggagatgctccgagatgtgctcgcgaacaaggccacctgacccgggcactgggctatttcctcgggttcagtcccgcacacttgaggttcagcctggcagacgttggctccagacagcgtttggacccgccgcctccaccacccaaagttccgtgcgggatgagactgtccgcggaagcgagggtgtcgctcgcccccgggcccgggtccgccccgctccgaggcctgctcggaagaaagacctcggtgcgcagttctcgtcgcgctcccacacctggtccgcccagtcggaactcacccctacggggccgcggccggtccctgagcctgagaagaaacagcaaccggcgctcgccagaagtatcctcacttcctgtgttgacgcctaatgatgatataatagccgacctctggcccagaactcaagacgacaggggctcgctctgtgcggcacttcctgtgtctgcgcgggatgatgacgcataaaacagcgcttgctcaggtccaggactccaaaagaaactgcgccgtgagctgcacttccgacttcggcgcgggccggggcgccgagcagagcgacgccgacttttggagcagtttgcgcctgcgcggaacgcgtggccggcttccggaatcctaccgggacttttccggtagcgaagcccgcgcctgtgccaaggcttgcgagcagaatgccttcgcgatggacgcccgcattccacccccttgaccgctgggacccctagtggcgggtgggtggagcgcgctccatttacctgctggttacctcgtgaggcgcctcaggtctgtgtgtcttgtaaaggccgatctcggaatttaactctgaaccttactcagaaacaaagcagggagagctcttacgatgtgattttattttatttattcatgtatttacttttgagtcggagccttgctctgccgcccaggttggagtgcagtggcgtggtcttggctcactgcagcctcctcccgggttcaaggaattttcctgcctcagcctcccgagtagctggaaccacaggcccgcgccaccacgcccggctaatttttatatttttggtagagacgaggtttcgccatattggccaggctggtctcgaactcctgacctcaagtgatccgcctgcttcgtcctcctaaagtgctgggattacaggcgtgagccaccgcgccgggccttttacaatgtgattttgaagctgacactggcagtgggtcctcaaagtgcagactcactgggtatggtgcttcccccaactcccagggccccactccaaacccatggattcagagcattgcaggagaagaggataaaacgagcaattaattccctttccatatgtcaggttttcctcttgccttgaaaagtcacagaaaaatgctttagacatctgaatctcaggaaacaaacaatggaagataaacatccgcatttactgggcctgaaatgggaaaatgaaagatgtggcaagaaactgacaagggcccaagaagggcgatgggtatcggaattcttttcatcccggaatgaaatgctgcttgctttgtgtacccaagctctttttttatttttatttttttgagacggagtctcgctctgttgcccaggctggagtgcagtggcgcgatctcgggtcactggaagctccgccacccggattcacgccattctcccgcctccactccattcgcccgcattaggctcctgagtacctgtgactacaggcgcctgccaccatgcccggctaattttttttttattttcggtagagacggggttttaccgtgttagccaggatggtctcaatctcctgacctcgtgatcagcctgcctctgcctcccaaagtgctgggattacaggcgtgagccaccgcgcctggcctcccccaagctcttaatgttgcttcctgagttcttggtaactggggaaatctccctatttttttatttttatttttttttgagacggagtcttgctctgtcgcccaggctggagtgcagtggcgcaatctcggctcactgcaagccccacctcccgggttcaacgccattatcctgcgagcctcagcctgccgagtagctgggactacaggcacccgccaccgcgcctggctaattttttgtattttttttagtagagacggggtttcactgtgttcgccaggatggtctcgatctccttaccttgtgattcgcccgccttggcctcccagagtgctgggattacaggcgtgagccactgcgcctagctatttttattttttctgatagggagactcgctctggcccaggctggagggcagtggcgggatctccgctcattgcaagctccgcctcctgggttcacgccattctcccgcctccactccattctcccatcttaggctccagagtagctgggccaccatgcccggctaattttttgtatttttagttgagaccgggtttcactgtgttagccaggatggtcttgatctcgtgacctcgtgatctgcctgccttggcctcccaaagtgctgggattacaggcgtgagccacagcaccctgcccttttttttgagaaataagtctcactgtgtcacccaggctggagtagagtgacacaattttgggtaactgcagcttccacctcccaggttcaagtgattctcctgcctcagcctcccgagtagctgggactacaggcgcccaccactacgcccggctaatttttttgtgtttttagttgagacggggtttcactgtgttagccaggatggtcttgatctcatgaccttgtgatctgcctgccttggcctcccaaagggttgggattacaggcgtgagccacagcacctttttttttctgttttgagagaaagtctcgctgtgtcacccagactggagtgcagtggcacaattttgggtaactgcagcctccgtctcctgggtacaagtgattctcctgcctcagcctcccgagtagctgggattataggcgtgcgccaccacacctggctaacttttgtatttttagtagcgacagggttttgccatgttggccaggctggtcttgaactcctgacctaaagtatctgcccaccagcctcccaaagtgctggaattatagtcatgagccaccgtgcccggccaaaaatctccagtttacccttcctttgtgaaatctgttgagtacccaaatgcagccactcatgtcaaaccctaacaaaatcgaccccagagcccacgaggagggggtggcctcgcacttgcgcttgataggagctgccacaaaggcctttcccaaccagaactttgggtccagccacttctgtgaagagcctctttgctagcaatagccagccccaccggtgaacaaagtagcatgaacaccagaggtccacaaggaagaaaacaaagcagtccatatttaacatttattttactttgctgagcaagaatcatagacagctactaccacggctgcttcgtttggacaaaaataaccaggaggcatccacgggattagttacacggtatcaacttaccaccacagcagaatcaacagtgactcgctaattaacagaaccgtttgctagaaagcactaatctagttatataaatactgaaataggtcacatgcaaaacactataaacgttttgtgtgatgtacttttagttctccatagttttgtttggtataaaggaaatataatttggctgtgacgtagactgttgatgtaattttcaagttttcctgtatggggaaagttgccctgactgtggcccttttcaaggtggagcctccaacaccacgttggcagattcagactccgtgaacagtctaaatgagcaagtcagctgaatgccactttcagatggaagggaaatgagatggaaaacaacaaaaaaggactgccaggcggaacagtttccaaccgagttttcgttgagtgaggatccagcagccatcaaactcaaacataggggcccgcagggaaactggaggaaatacttcagagacagcaaagctgaaggtttctgtgctctgagggatccgagagtggatgtcccactcctgtatcctcagccagacacagaactagccagattcattagggaagctcagatgctctcattctataaagtaaggcccccagcagggcacgtacatacattgggaaagaagaaaccccttagtaccatgttggtcaaaggcaagagagagaattctatttccatctggaatgtcattcttgtttacttcttccaacagtgaaatacttccaggccttcgaaaggccatcctttggacacatgtaaaaagctgtcttgttggcccgttattcccactgacccgtctgagtgatcacccaggagcgcggcggcagcaagcagagctcaccggatttgggacaaggattttaaaggcagctacaaagctgagctctatttgctgatgatagtctctgttcagctgtttaaaatgactgtctgactcaccatggtaatttttcacaaattaaaaacacattttgggttgtgcaacagtgttctcatctttccaggcaggcagattattttaatgctgttatacagggaattgggactctcggattttcttttttaacctttttatgcctttcagtaggggaagtttccttgaaagttagagagctgcaaatctctaagtatcaatgtaaagaagccgatgacccaattcggaaggtggttcaagtgttctgtttgtttacaaaggcacagaccacgaccatggacacacccagtggaagtaaccacacccggtgtgttcctagaagctcatctgtgacagttcaacaagaacttactattctagaaaagtattacacaaagttatttaaaaaaatgtctgtacaatcgttaacacggccaagccaggccttgggttttgcctcttggtgtccagctgtgctgggaatgccatgaagaccagcggctggaaactgacttgggcatggagaagagactgagggagagggaggggacagcacgactgagcaagggcacagtgctggctgcctcatgggctccaggctccttctgccaggatgaggaagaggccccagagcagcgttacacaggaaatcaacctatttgctaatcctttggaaaaacgtttgtttctggtccacaaacagaaaatccaaacaggatggcagctccttgtgagggtggaggggagggcaccagattctgtgcggctggaaattccaaggtgctcagaaccaggcgcctgcacctctccttatgccagaccacaatcttcaaagaggccggcagccatattctcgatggggaggtggacaaggccaccctgggagttgctttcaatctgtcctcacaaatcaacaactccccgccacctccagagcattttctaatagtgtttgtttttgagacggaatcttgccctgttgcccaggctggagtgcaatggcacgatcttggctcactgcaacctccgcctctggggttcaaacaattctcctgcctcagcctcctgagtagctgagattacaggcacccaccatcacacccagctaatttttgtatttttggtagagacagggtttcatcatgttggccaggctggtctcgaactcctggccttgtgatccgccatctgcagcctcccaaagtgctgggattagaggcctgagctaccgcagccggtcttctattagtttttgaggaaagcagaaaaaaagaaatggaaacccagggaaagtcacgtgacaaaacatcttcgcagcgcagtgagcacacacctggcctgtcctccacacacaggtcagcggttttatagaagcggctgaagcaggtgtagtagcccacgcctatattctcgacactacaggaggctgagtgggaaggattgcttgagccgaggagttcaagaccagcctgggcaacaaagcgagagcccagctcaacaaaaaaatagccaggcatggtggcacgtgcctgtggttccagccacatgggaggctgaggtggatcacttgagcccaggaagtcgaggctgcagtgagccaagatcatgccactgtactccagcctgggtgacagacagagcaagactgtctcaaaaaaataaaaaggttacttgtgggttaaaaagcctcacttcggtccatcatcatggcagacttttttgagtaggtagaagttaatgagtcagaattattgctctgtttctgaacgattttatcttcaggaggggctatttttgtatttcccaggtgagaagccaaatggaaaaccagtgaagtgaccatgggtgccaaaggcctaaagagcaggcagggaaatgagactcgggaccactggagccccatgctgcctctgacaagccctggagctctgggtctcaaaggctggctggcaacaggctgcaccgggcatgggaatccgccggctgcgagattgggggtaaagagctcagacatggtcagaagcctctgcctaacacacggctccagtagccactcctcaggcctcctgcgccctcgggggtgcgtgacacaggaggatgagttgagctggctggtggccccagtgtgccgtactactgtcccttggggagagtgggacagggtgggcgcctgacacacaccacgcgccccagaaacattcagtgtggacgtttcctttttcagcaaggacggcgcccaggtaaacgccacgtaacccaaaccatcaacactgcagcgtcctgcccaaggctcacgtggggaaccggacaggtgctagatgatgataggaacggtgggctctgagggaggacagacaggctcaccccacggggacctcagaacagcctgcctcatactcagagtccaaaaaagaaaaggaacgtacacatctcctcccaagttaaacacgagaggtttgtcctcaacctcagggctggaaaccaccacaggtaggaggctgggcacgggggctcggcctgtcatcccagcactgtgggaggtcgggtgctagaatcccagcactgtgggaggccaggcacgggggctcacgcctgtaatcccagcactatgggaagctgggcgtgggggctcagcctgtaatcccagcactgtaggaggccgggcgccgtggcgcatgcctgtaatcccagcactgtggatggccgaggcaggcggatcacgaggttaggagttcgagaccatcctggctaacacggtgaaatcccatctctgttaaaaatacaaataactagctgggtgtggtggcgggtgcctgtaatcccagctacttggaaggctgaggcaggacaatagcttgaacgcgggaggaggaggctgcagtgagctgagatctcaccactcactgcactccagtttgggtgacagagcgagactctgtctcaaaaaaaaaaaaaaaaacaagaacatctcccacacactcacagtgcctttgtagccccagggaaagcaatcccttaagatcatttgttgggtgaaaagggtaccaagtacacagtgttaggaccgtgcaaaaaaagggtgacaggaagtaccctttgcaaactttccataatgtgtacttaattcactgctcttataaaatgaaattaaataaaacaaaaaaatactactgaaaaataattgggcaacatgcggtggctcacgcctgtaatcccagcactttgggaggccaaggcagacggatcacctgaggtcgggagttcgagaccagcctggccaagatgatgaaaccctgtctccactaaaaatacaaaaattagctgggcatggtggcaggcacctgtaatcccagcttctcgggagactgaggcaggaaaatgtcttgaacctgggaggtggggttgcagtgagccgagatcgcgccactgcactccagcctgggcaacagcgtgagactctggctccaaaaaaaaaaaaaaaaaaaggaaaaataattgggctgagtgtggtggctcataattgcagtcctagcgctttgggaggccaaggtgggtggatcacttgaggccaggagttcaagatcagcctggacaacacagcaaaatcccatctctcaaaaaaagtaaaataaaataaaataacaaaaaacaaaaattagcccagcgtggtggtggacacctgtagtcccagctactcaggaggctgaggcgagaggatcacttgagcagggaggcggaggttgcagtgagctgagatggcaccaccacactccagcctgggtcacagagcaagactctgtctcaaaaaaaaaaaaaaagttttttttttttgaaccactgctaacaatcactaatgttcactaaaacactaggcttcaggagcatttggaaataattcctgaccgcacaaagaaacatgctggtgagagacagtgaccaagcccaggagaccaccatgagttccagaaaaagtgagagagagcggccacttttcctgtctcggagatacctcctactcaggacgcaggaagcatggggcagggcagcgccatggacaaggcgactcggtgcagggcctgcgggacctgcaggtgagaggaagcacaagctccagctcctcagctgtggaacgctgcgtgcgtggtgcacagctaccagctcggatgggtatttgagaatttaccgcactgacttggaccagacggaaagcagagaagagggagagctacacctgactgtccaccattcccgccagccccaacgtcggcttttcacttcatgtttggggacaattacacctcctcatgacagatcagaagtttcagaaaaaaggtccgctgatttccgcaacagggtatgaggtggccagctgctgatgccagctgcatggactcctatacttgctggtaacataacctcattcctttgtatttgccaccaaaaagtctccagtctttttttttttttttttttttttgagacggagtctcactctgtagcccaagctggagtgcagtggcacaatctcggctcactgcaacacccgcctcccgggctgaagtgattctgatgcctcagcctcccacgcagctgggactacaggtgcatttcaccaggcctggctaattttttgtgttttagtaaagacagggttgcccatgttgcccagggtggtctcgaacccctgagatcaggcaatctgcctgccttgacctccagtccacctggctagtctccagtctttaaattgcacctttggccgggtgcagtggcttgcacctgtcatcccagcactgtgggaggccgaggcgggcggatcgcctgaggtcaggagtttgagaccagcctggccaacatggtgaaaccccgtctccactaaaaatacaaaaattagccgggcatggtggcacgcgcctgtaatcccagctacttgggaggctgaggcaggagaatcacttcaacccgggaggcggaggttgcagtgagccgagatcaaaccaaagaaatccagctctgggtgacagagcaagactctgtttcgggaaaaataaaatacataggcagggcgcggtggctcacgcctgtaatcccagcactttgggaggctgaggcgggcagatcacaaggtcaggagatcgagaccatcctggctaacacggtgaaacccagtctctactaaaaatacaaaaaaaaattagccgggcgtggtggcggacgcctgtagtcccagctactcgggaggcagaggcaggagaatggcgtgaacccaggagacggagcttgcagtgagctgagatggcgctactgcactccagcctgggcgacagagcaagactccatctcaaaaaataaaataaaatacataaacaaataaattgcagcttcattcaatctgcccagttacagaagtggaaagaagctgaaggatcctccccgtttctagagctgcaccgcatggcacaggaagcagtggccacaggtgtctgttcaagttcaaactgacagcaatcagcttgaattccgaatctggttcttgttatattctccacatttcaagggctcagaagccgtatgtggccagtggctcctgcactggacagcccagaagagaccattccattcctgcagacaaaactagtcgcagcaccctgctattctagacagaaagcactcaatttcaaaaaccttcaaactcagagacttctagtggagatttccctaaatacctatttcacacagtttacggtttattttacagtttctcatttgtttttttgttttatttattttttttgagaaggactctcgctcccatcccccaggctggagtgcagtggtgagatctcgactcactgtaacctctggctcctgggttcaagtgattctcctgcctcagcctcccgagtagctgggattacaggtgcccagcatcacacccggctaatttttgtatttttagtagagatggggtttcaccatgttggccaagctggtcttgaactactgacctcaagtgatccacttgccttgtcctctcaagtgctgggattacaggcatgagccactgggcccggcctatcgtttgcatttcaaacagcatgggtataaaatagcctagtaattacactgcatagccacagtcatccccgtggaagagaatcacatgtgtcccttataaaaatacctagatttctggtctcctttgtaaacaacctggacacactcaactcttgggaagttcctctgctcacctgaaagtcaccggggagattttccccatgagggcgtacgccgtgacgctctgaaggtggaacaggactccgtctgtcagaagcagcagcaccacgtcctggttgtagctgaagctcttcccgctcctcccgatcactgggacgtcctatgtggcaaacaaaagggtactctattggtttccattttccatttactaatcatccaccacgaacacccagcgccactcctgcccagaaactgggtaaagctgctgccactgaggacagccctgaaaatgcctcgaggggacagctgaactgtgcactcatccattttctgttttttgtttgtttttattattttttgcactaattaattttcaccatgcagatgcaaatggacaacaagcacatgaaaaaggctgaacatcaccatcatcaggaaaatgcaacagaaaccccaatgcggggccgggcgtggccagtctggccaacacggtaaaacctcgtctctactaaaaacataaaaactaaccaggcatggtggtgggcgcctgtaatcccagctactcaggaggctgaggcaggacaatcacttgaacccggaggcggaggttgcagtcagctgagatggcaccactgtaccccagcctgggcgacaagacagagacttctctgggctgccagaggctccggaagccgggtgcctcaggccgtggcagttccgtcactctccaacgcctcccccacagacttctttttgctaaatggtatcaagattttctcgttgttgtcagcaagagagttggttttctaacatctcatcgaccatggctggaggtcaaatcgatgttttaaacttgctggaaataaacggttcctttcttgcatggctcgatgagcaataaggttcctctgtgtcattttgtttacgatttttaggattgctttttaaagccggacacggcggctgatggctgtaatcccagcactttaggaggccgaggcaggaggatcacttgagataaggagttcaggaccagcatgggcaacacagcgagaccccatctctatagaaaacacaaaaatgaggctgggggtgctcatacacgcactgagggttgaccctggtgttcttgccttcttagattcttctggagctggagatgaactcggacctcaaggcccagctcagggaactgattattacagcagcgagggaaactgaagttggtggtggtgagaaagttatcatgggcaggtacagcagctcacgcctggaatcccagcactgtggggagctgaggcgggaagatcacgaggtcaggagctcaagaccagcgtggccaacatggtgaaaccccgtctctactaaaaatacaaaaattagctgggtgtggtggcacgtgcctgtaatcccagctactcagggggccgaagcaggagaatcgcttgaacccgggaggcagaggctgcagtgagccaagattgcgccactgcactccagcctgggcaacaaagcgagactccatctcaaaaaaaaagagggccggctgtggtggctaacacctgtaatcccagcactttgggaggctgaggcgggcggatcaacgaggtcaggagatcgagaccatcctggctaacacaatgaaacccagtctctactaaaaatacaaaaaattagccggatgtggtggtgggcgcctgtagtcccaactactcaggaggctgaagcaggagaatggcgagaacccgggagatggagcttgcagtgagccgagatcgcaccactgcactccagcccgggcgagagagcaagactccgtctcaaaaaaagaaaaaaagaaaaaggccaggcgcaatggctcacgtctgtaatcccagcacttagggaggccaaggcgggcagatcacttgaggtcaggagttcgagagcagcctggccaacagggtgaaaccctgtctctactaaaatacaacagaattagctgggtgtggtggcagacagctgtagtgccagctacttgggagtctgaggcaggagaatcgtttgcacctgggaggcagaggttgcagtgagccaatactgagccactgaactccagcctgggcgacaaggcgacactctgtctcaaaaaaaaaaaaaaaaaagaaagaaagaaagaaaaaaaaaaaaaaggaagttatcataatctttgttcttcttctgccactgaaataattccagaacatccaagtctggctagtacgtgaattggagaaaaagttcactggtaagtatgtcgtctattgcttagaggaaaattctgcctaaaccaactcaaaaaaggtgtacaaaaaataagcaaaagcgtcccaggatccacgctccgacagctgcgcacgtcgcaatcctcgaggactcggtcttcccaggtgaaattgtgggcaggagaatccgcgtgaaatggacacagcagctcacaagggttcattcggacaaagcccagcagaacaacgtggaacgcaaggtccaaactttttctggtatcgataagaagctcacagccaaggctgttaattctgaatccccagagttcccagtttcaattgttaagaaaaatgactaacgtatactcacagtgaaaaaacaaaaagacacacaaaatacaaaaattagctgggcatggtggcacatgcctgaggtcccagctacccaacaggctgaggtgggaggattgcctaagcctgggaggccgaggttgcagtgagtcgtgacctcgccactgcactgcagcctgggcgacagagcaagaccctgtctcaaaaacataaaaaaaacaaaagaaaaaaaacaaaaaaaaaccagagttgacttttaggctttgattttgttataatcacctaaacgtgtgtgcgggtctcaagtgcatgtggggcaagcccaaccccatcctggaccctcggcctcctcccgtccccaaaggcagacagacacttccctcggccttaagatcttgtcgtttcttaaataagcgaacacgtgtgcacccccacactccgttcaagatgccgcgctctgtgggcgcctctgctcctcgctggttttcatgcagccacactgggtacgcgacatggggctgacatgtcactggaaatcgcctgtgagtcattaagaggtgggagaggcaggagcctgggttgcagctgaggtcaggggctggggcccaggacaggcctgtggtggcgggtgctggggaggctgtggggtgctggcacaggagggcccacggaccaggggccacggccgcctgtatggtgctggccgaaggcggcccccgcccgtcctcttcggatcagtgattggcacctgcagtaatcttgcttgccaggaatctgcccagcccccacctgtctccccacccagttagggccacgagacacaaccctgccctgacctccgcatgccagtgtgagaacacctggcagacgccaggctccaagacacccccgcacatgtgaccgtgagagaagtgaaggcactgccagtgtgggcaccactctgagtggtcctcgcggcagagccccatggcaggcagcagagacgggcaccacggatggaggcctgggatggtggggcgcaggcggaggggtggggcccagggggcctcacctgtgtactcccccagaatcatccgagacatgatcaccgtgaagatgggggcggagctcttcaccgtctcagcaaacgaaaccgccacatttttcaggctgaccaaacccaaaaccacagttgcaaacctaaaaatgagccaaaagcaccatcaccttagaacgagtctgtctgcctgcacccaccgggcaggctctccaaggggctcgctcgctcggttggcacgtcggcccctctccgcccacctcctcatcaccaacatggtgcctggacccgcttctgtgacgctttaggtcgagcccccaggaaacggcactgcgtccaatgggaagtgacttctgccaccccttgaaaacgtcccagagacaaggaggcaccctgtcctgagaccaccagcccggaaagaagctgactgaacacacgtggcagtgagagccacgaagccacattcatttggtgtcctgaaatctggacagccctggtgcttttataaagtctgcactgaaaactcaccagccagcagagtccccgctctagtaacgagagggactttacatttaaagaaaaagagacactcaaccaaaaccaggagattctttacctcatcagacccacaaacagcatcgtcataaggaagttgggtgggtaggaaagccgggccttgtgctgatataaacagcaaggaacgagggttttcacacacccgataaccgtggtggacagcatctgcaccgcacctgcgggagggagggggccgaagacaagagggagaatcacccctcccgtgcctgcagtgggctccacccccggtctcccatcctgacctgggctcccccggccctcccgggtggttgctggctgctccctgtggggtggcaggtggccggcttccaccctgcccgagccgccgcctacctagcatgctgggctcgcctcccagcagggacaggatgtacttgttgaggaagagcgtgcagaagctgaagaagaaccacagcgtgaggtagagcagcgcccgcgagctccacacacccaagtctgactcgatgaccgtggtctccgtgatggtgacggtcagtacgttctcatctgtgccgccgtcgctcttggcaaaaacaatcttctcacttcggtgaccaaacagagagccccagctgagaggcgacctgcctttcggcttctcttcggagccaggaaccagctcttccagtgctggggttttcaccgaggacgacatgctgaagccacagccacgaacgattttacctccaggctgggcagcatgggtcaccgtgaccgcccgggggtggggccgcagcagggactccgggcgccaggaacgaggccaccagggcctctcccaggcaaagcgtagaagcagacgctaaaatattaagaaaaggaaacacatcacccgttttgaacatttaatgtcctcaaaggtttcaaccaccaatttaaaatcactttgaaaatgcaattgggccgggcacggtggctcacacctgtaatcccagcactttgggaggccgaggcaggtggatcaccttaggtcaggagttcgagaccaccctggccaacatgacgaaaccccgtctctactaaaaatataaaaactagcagggcatggtggccggcgcctgtaatcccagctactcgggaggctgaggcagaagaattgcttgaacccaggagacggaggttgcagtgagccgacatgataccactgcactccagcctcagtgacagagtgagactctgtctcaagaaaagaaaaaaagaaaatgcaatcgttcactgtccaaagatttttagcaattgaatcccgtttttctctgcgcgtgttggcggatccttgctcttgagagacggtctcctggcacacttgactgtcgtcctggcagacctggggctgtgggtccttcacgccctgcctggcagctgcaccttctcgatgggctttgtggctgccgctgccgggtgcccaggactaattccatgctactttctttttttttgagacgggagtctcgctgtgtcgcctagcctgaagtacagtggcgcgatctcggctcactgcaagctccgcctcgcgggttctcgccaatctcctgcctcaggctcctgagtagctgggactacaggtgcccgtcaccacgcccggctaattttttgtatttttagtagagacggggtttcacagtgctagccaggatgatctcgatctcctgacctcatgatccgacctccttggactcccaaagtgctgggattacaggcgtgagcctccgtgcctggtcttttatttttttgagacagagtctctgtcgcccaggctggagtgcaatggcgcaatctcagctcactgcaacctctacctcccgggttcaagtgattctcctgcctcagcctcctgagtagctgggattacaggcacccgccaccatgcccagtgaatttttgtatttttatttcattttttagatggagtttcactcttgttgcccaggctgcagtgcaatggcacgatcttggctcaccacaacctccgcctcccaggttcaagcgattctcctgcctcagcctcccaggtagtggggattacatgcacgtgccaccaaaccctgctgattttgtatttttagtagagacgggttttcgccatgttggccaggctggtctcgaactcctgacctcgtgatctgcccacctcggcttcccaaagtgctgggatttacaggcatcagccactgtgcccagcctcccttttcttttttttttttggctgactcatgggttagaattctggattgggcaaacacataaacattttgtacatgacgagagccagatttcatcatgtgagtgaagcgagatgcaaacacgaaaggaagtccttcaaggcagccttgtagtgaaaaaataaaaataaaaatgaaaaaaagaggctgggcacggtgactcacgcctgtgatcccagcacttcgggaggctgaggtgggcggatcacaaggtcaggacatcgagatcctcctggccaacacagtcaaaccccatttctactacaaaaaattagccgggcatgatggcgcgtgcctgtaatcccagctactcaggaggctgagccaggagaatcgcttgaacccaggaggcggaggctgcagtgagcagagatcgcgccattgcactccagcctgggcggcagagcgaaactctgtcccagaaaaaaataaagcttagaaacaagaggctatgtagtctcgagatagatccagccctatgaggcacatgtcaatcacagagggaaagctatgcacgcacaaagcatgtgtgaatcagagagaaagctatgcacgcacgatgagtagaagacaaacacgtcctgcaaggagacggaggcgcagggagggggtggcagccgtcctcccaagacatgaggacttctagttcagtctgagaccttggtgcagggctgggcgagtaaacaaatgcaaaagaataaggacctcgaggtcgggcgcggtggctcaagcctgtaatcccagcactttgggaggccgaggtgggcgcatcacgaggtcaggagattgagaccatcctggctaacacagtgaaaccccgtctctaccaaaaatacaaaaaaattagctgggcgtggtggcgggcacctgtagtcccagctactcgggacgctgaggctgagacaggagaatggcgtgaacccaggaggcggagctttcagtgagccaacatcgcgcctttgcactccaccctgggcgactgagcaagaccctctctcaaaaaaaaaaaaaaaaaagcaaaacagaataaacatacgtaggccaggtgcagtagctcacgcctgtaatcccagcactttgggaggcagaggcgggcgtatcacctgaggtcaggagtttgagaccagccttgccaagatggcgaaatcctactaaatacaaaaattagctggacatggtggtgggtgccagtagtcctaagtacacaggaggctgaggcacgaggatcgcttgaacctgggagacggaggctttagtaagctgagattgcaccactgcactccaacctgggtgacagagcgagactgtcttaaaaaaaaaaaaaaaaacaaacaggtctggtgtacgcagaatggaggcaccacgaattgctgaagaaggaaactttattcagtctatgataccaggacagttgtccatgctgccaggcaaaaagaaaaactggattctgatctcattatcagtagacaaacagcgacaattagtaacactgacacagccctgactgtgctgctggagggtccgaagcactctctgcacagcggtgaatccgcacaacagccctctggggaaggtgctgttatcacccacgtgagacacacgaaggaaagacacggcttcgcagcagcagcgtcatgattcgaacccaggcggcctgctcttatgataaacttaaatgtgtaaaactttatgctcaggaaaatataagagaatgtcttcctgaccctttttggggtaggacaataatttctctaaccaaaccccaaaagcatgacccattaaaaaaagggtcaggtggactaacttggctaaatgaagaattctgtttcaccaaagtacactacaaagtgggccaggcgcagtggctcatgcctgtaatcctagcactttgggaggccaaggtgggcggatcacttgaggtcgggagctcgagaccagcctgaccaacatggtgaaaccctgtttctactaaaaatacaaaaattaaccaggtgtggtggtatgcacctataatcctggctacttgggaggctgaggcaggagaattgcttgaacccaggacggggaggttgcagtgagcccagactgcgccgctgcactccagcctgggcaacagggcgagactctgtcttaagaaaaaaaaaggccagacttgtctcacgcctgtaatcccagcactttgggaggctgaggtgggcggatcacccgaggttgagagttccagatcagtctgaccaacgtggagaaaccccatctctactaaaaatacaaaattagccaggcatggtggcacatgcctttaaccccagctgctcaggaggctgaggcaggagaatcacttgaacaggggaggcagaggttgtggtaagccaagattgtgccattgcactccagcctgggcaacaagagcaaaactctgtctcaaaaaaaaaaaagaaaaaaaatatatatatatatatacatatacacacacacacacataccacaaagtgaaatgaacagccacaacctggcaaaagatacttgcaacatgacaaaggattaataaccagaaagtataaagaattcctacaaaccaattagaaaaacaggcaaaaaaaaaaaaatattggcggggcatggtggctcatgcttgtaatcccagcactttgggaggccaaggcgggcagatcacctgaggtcaggagttcgagaccagcctggccaacatgatgaaactccgtctctaccaaaaatacaaaaattagccaggcgtggtggcaggcgcctgtaatcccagccacgcaggaggctgaggcagcagaatcacttgaacctgggaggcggaggttgcagtgagctgagactgcgcctgctccagcctgggtgacacagcaagactccgtctcaaaaagaaaagaaaaaaaaaaaacaaaacaacatatttcacagagaagaatttatgtttttggagaaggagtttcgctcctgtcgcccaggctggagtgcagtggtgagatatcagctcactgcaacctcaacctcccaggttcaagcgattcacagaggacaatttctaaaaggcaaataagaagcaggaagggtgcatgctccttctctactgccctgtaacagtcattccacacttaccacctcaaaacaacaaatgcttttgatgttggctcctgtggggcagcaatctgcgggaagcttagccaggcacctctggcttaaggtccctcctgaagctgcagtcacaccatggaccagggctgtgacctcatccgaaggctcaactggggctgaggcccacctctgagctcactcaggtggacgctggctgggttcagttccttgctggctataggtggaaagggcccccaccagtttcttgccagcttctccacaggacgccccacagcctgacaggagctttcatccagcaagctcatcagggagtgggagagagcagccaggacaggagcccaggcctttctgaacctcatctcagaagtgacatccttcccttctgctgtctgggcacagctccccgggtggagcccgaggactagaaggaaaagaaaacttggatttaaaatgggataaagccataggagctgctcgtcccaccacaggaatctcaacgccgggttactgacaaagcgtcactttgcacctcgtccaactgtgcagacctctcctagccaggcccctgcaccagaggttaagaatccgtgcccctggtcaggaagtccaggtgggttcaaacggccagcagggaatttcaggcaaaatgtgtcccaaatcttcaaaccacgccccagaactcagacctccccctgggagttcgtcccaaggaaaccacctgcaagaggctcaggctgcaggggacactccgcttccaaaacccggaagctggagaccacacaagtgcccaacgccaaaggcaccccgtggagggacgccctgtgccctcccccgaccaggtgacccgctgcgccctacacatcttcaccaggaaacatctgttatcgatgtggacgaagcgcagcctgcactcccagatccgctcattttcgttctgccctccgttttacgattcgcctacactgaaaatgcgtgagtggagtggaaagccttcctactcctgcctcagcgaccccttctaaaatactgcctcgtttggcctgaaaatgtgatttgcaggcttcctgagcaaagtagatttcactccattaaagaaaaaaaaaaagaaaaggcaccgaacggggctcggctgtcgggagttttgctttagttttttgcgtgttttgttttgtgtttttttgttgttgttgttctttttgcggccacgcacaccgcgttcccaggcttcagggcgtgggggtcgccgtggactcccggacgtgaaaacgcttaaagccagctgggaaaaccccaccagcgttttccgcgcacagcgccagccataggaaaggacccccaggagcgaatccgggcagggaaaccccggacgcccgcacactcagcatcagtaccggcacccagcacccagcaccgagcaccgagcacgcagcaccaagcaccgatcaccgagcagagcaccccgcacgcagaacccaccgagagcctgatgcagtctccgccgcaggcatagcgctaggccccggcgccttcacaacaaagggacgctggcgggcggggcctaagaggtgcgcggtggaggggccgggcgcgaggccgcggagacagctcggagctcggcactggggagtggcacagcgctggcggatccaggtgggcttcacggggcgcccgcgggaccggaaatgacgcgcagaaccctgcatcgggctcctcgctgccccgcgggcgccgctcctcagtgccccagagccacggagccggggaaacgcgccgcggcccacaacgcccccgcggctgcccgttggttccgcccgagccgttctactccaggcagacgggaggagaaacacggcgcgctcagcgtcccctgccccgttggttctgctcgggcccttccactgcaggccgacgggggtggaaacacgcagttttttttttttttttttttaaggtctagggtaacacggggcttttaagtgcctctccgcggccgcctggtggtccagcccgggccgctgcagtgcagccacacggggagggacacggcgcgccgagtgctccgggcggccgcacgttggttccgcccgggccgttccactgcaggcagagggagaggacgacggtgcgcgtagtgcatccccgtggcccgttggttccgccggggccgttccactgaaggcagaaggggggggaaccgtggccccaccccccgcggcagcccgttggttccgcccgggctgttccaccagcggcacttcagggcgggatcggccagtctgtggaggcagcggcctctaagccccggagggtttactgcccaggtttgggttccaggaataagaaatccactgaataggcttaacttagaagacacaaaggcgcctcctggcggaagtggccacgctccgcccagcctgagggaaagctgctctgacagctgggcccggagctgcggggggcggggccgccgcgcggggtgaggactcgcctcagggcgctgattggctggtggcgcgctccggggcggggccttcgtatccaggctggcgtcggggctgccgcgggacatccggagcagacacccgcgggcgcgcctgcggccccgaggacccccggctccggagcttcgtcgagcgttttcctagcgttactttcccaaataattttcaggaatgaagttacggctaaagggctctttagagattacttttgggccgggcccggtggctcacgcctgtaatctcaacactttgggaggccgaggccggcgcatcacgaggtcaggagcttgagaccagcctggtatggccaacgtggtaaaacgtcgtctctactaaaaatacaaaaattggccgggcgtggtggcgggcgcctgtaatcccagctactccggaggctgaggaaggaggatcacctgaacccgggaggcggaggttgcagtgagccgagatggcgccactgcactccagcctggcgacagagtgagactccgtcaaaaaaaaaaaaaaaggaagaaagaaaattataaaatgaagtgaaattaacgcagtggagtgccacctgcctgctgcctgagttcactatccacacggagttcataaatttgagagcagtttacaaagtagattctcctactttccaggaaacccagaaatgtctggtgatttgcccaacagtctcagctgttgtggtcagcagggccgctgtggtatccaaatgatttcaaaagcagatttataaaaagtactccttgtttttttttgagatggaatttcgctctcatcgcccaggttggagtgcagtggcacgatctcagctcactgcaacctccgcctcccgggttcaagtgattctcctgcctcagcctcctgagtagctgggattacagatgtgtgccctcacgcccagctaatttttatatttttagtagagacagggtttcaccatattggccaagatgttctccatctcctgaccttgtgatctgcccgcttcagcctcccaaagtgctgggattacaggcgtgagctaccccacgcccggcctttatttttttttgagacggagtctcactctgtcgcccaggctggagtgcagtggcgcgatctcggctcactgcaagctccacctcccaggttcaagagattcttctgcctcagcctcccgaggagttgggatcacaggcacccgccaccatgcccagctaattgttttgtatttttagtagagacggggtttcaccgttgttagccaggatgctcttgaactcctgacctcatgatccacccaccttggcctcccaaagtgctgggattacaggtgtgagccaccacgcctggcctctcaaagtttttatagcaaagccttacatttcatgaggaaccatgcattttattttatttttgagatgggggatctcgctactttgcccaggctgggctcaaactcagggctctctggcctcagcctcccgagtagctgggtctgcaggtggctgtcaccgtgctgggcctggggtgtgcgtattaatgattttggaatagtgtctggaagcctgtgtgccttcctctcttcctctccccagaaggacctcccacctcgtcctcccaaagtgttgggattacaggtgtgagccaccatgtcccctctctttgctattttgcctgggaggagtgtattaataattttaattttaaatttctttgattatgttctagtttgattattgatcatttacttcttagctatttatattcttccttgagtcatcggtttctgccctttgacaatttttctgtgaatgttttgtgttgattatatgagctttgactgtattgagaacatccacgcattgtattattgcaactgttttcctagttgagaacatcgacctgctgtattattgcaaatgttttcctgcttgcatgtagtcatttgttatgcatattaatgaatttctatccacatgacgtggagtcagttaggaatcagttaggacgccctcgctgtgtgggagactgatgggtccaggcgctgtgcaaaccccgcctccaaagtgcatccttggctcactgggaccttccgggttgtgctgctcttgcttcacagcctctctgggtctccctgccgtctgctgacctcggggcagggtctacccaggctgagcggcccatgggctgtgggattcctttcctctgccttcaggtcctggatgatgtagaaggcaggaaggaaagcagtcatggctagctctgtcctgcccccttcggggtcccccccggcccacaggctcctccttgtcccccagccagcctcagtctgggtctgggctcccgctggggaggagggtgagacctgccggcccaaaggagctgaagtttcccaaggggcgttgaggacagcagggaagtgtggggtgtgaactgaggccccagagaagggtctgtgccaaggccccatgggtggggaggaagaaggaagcgtccccacctggagacccagcctgcaggccactcggccacctgcgcagaagtaggggagcagcagccgctcatgcccctgcagtttgtcctcatcagcaggtggggaaactgaggccggggagttctccaggccaaggtcactcacgggcaagttcccgcagcctttggaccctccatacacgtcagggccgctcatgctttcctgggcccttcactggtttggaggaagcttcctgttgcccagagcgcactgcctgtctctgagtgtatgtgtctcagtggcgtccatgtgtatttttctctgtgtgtatctgtgtgagtctgtgtgtgtggtgtgtttgtgtctgagtgtgtggtgttagcgtgtctcagtggcgtccatgcatatttttctgtgtggtgtgtctgtttgtgtgtgtgtgaatctacgtgggtgtttgtccatctttttgtctggcctcctgtcccctctgcacagagcagctgggtggggatgctggtcctgggggcttgtcagcaggatgtgggcgtggggcagccctgggtgaggcctgagtacaggccccaggtgcctcctgcacaggggtggctgagccagctcctctgtggctcccgggtccccaccgccggtcactgggcaccacctgtcctggccacccactcctgcccaccctgctctccgcaggggcctccttcctctttcagctgtgcgccctggttgtggaggctcctaaggaggttgtggcctcggtttaccacctgccttggctccttggtgttgccagaccctgaaggcagcccatgccctggctgagatccttctggggcgggatgtgctggaagcagctgaaccacgtggtgatgtaccagctcctgctgtcccctacatccccagcaccgccagccttccctgggctcctccggccggctcctctaccctgtacccgccccaccctgctaccaccccccaaccagacttccagctccaggcagggtcgcagcctcctgggctcccagcaggacaggcctcacccagaccccgcaggagccatgggacttgggctgggtctttgggcctggctgcagcccctttggacctgacctgaggagacaccctggctgtgggaggcagggtgggggtgccgggcccagcacagaggtgcccagggtgcaggctggcactggcccggcagggaccgtggatgccgccgtttcaggctcgaaaaggtttccatgccccagagcctgagcccggcagcccccgaggatgtcttggggactctgtgctccccaaagccgagaaggttaggcttgacccacagcctcttccaggccggggaggcagaggcgctccaggtcggtagggcggggcccacagcccagggtttcacgtccccaaaacggggcagggtgctggaggcgcaggtgtccacagggtggtcgttttggtctctcctggacttgcacgcgtgtagtgcagactggctgccggcaaagccctgagccacattcatctgggccttgttaggacaacagggacggtgcggggtgggggggttgcggggcgcaggaccacgtcagtggagggagggaggccgatatcggtgcccaggctgggcccaggggccagcgggtcctcacctggcttgtggctgcccctgttaggcagcccggatggaggggctcttccagccctgctggccccgggaatgcagggactcaattccccctggtctcagtggctcttccgggagcaacacagcctgcccgagtcgacaccacccctcgggtttgagtcccttctgtctacccctacccccgccagggcactgcccccttgcccggaagaggcagcggcacccccagccccttggggaggatgccctgccggccccacactcggtggatgggcattttggggctaggatttaatgggggtgaccctgcccgacccctctatgttggttccacggcgtcagaagaaagctgttattaacccagcttattttctacaagtcttgtttattgaaaggatctgaaaagcgtaataaggctttcaatgacatttaatacattttcaagaaattaatatgaaacattaaaatttacttcaaaaatccaaagttttctagatcattcccatctcacgctgctttagaggtcagttcacaccttctgtgttcagatgagcggctggaattctgaacactgccgtcttccagccctaacgctgggcgctggtccctctctcctaagcccacggctgggcttcccctgtgcccagggtcatggcggacttcaagccaggccggctgcccagaatcacactcagggtttttggacgctcaagtccacagatgctgaggtgcccagacgagggtgagcagggagacacatgcctcggagaacgtgcccaggctgggccaggcggctgcgggaagctcctcacgggcagaggagaacgtcttgtgccttccttatcgatctccagcagatgagggcaacttcgtgtgcaaaactcagagagcagttactcaaaaaaaagacacccgggcagcagtaaccaggacaccagggtccgaccacggcctccacacacctgtgcccgtggaagacgcgggcgccggggtaggcagcatccacgtgctccacagctgccggtgctgggcaggctggagactcacgggagaggcaggaggagaatcagcgtgttgagtccctcgctgtgttagtgtgaaaaattctcattacagttgcaaataaaagggatcacgatcactagccccggaaaccctcatctcccggaccatcaggatcgcactgaacagaatggtcccctaatggtccctgaggacagcgtcttgcagaacataaatgtaaacattgaatggcagacgactcccttccccttgaaatcttcacaaaagtgtgtacgagaaagtatgtacatcagcacttcagaaagtttaaaagagtctctaaaaagtatatacaggatttaaactaccttcctgggagcagaagctacgtgaggaatgtgtgggtcgctggcgatgccagcccccttcccgctgagtgtcccagactcagtgctggcctcaagcggggagggctggatggcaggggacgcatccaaccctctccagaaactgagcagaacaaaaccgccttgccagccactggcaagaccatgctttcaatggcgcctccgccaggggcttccctgcagaagttttaggggaagaggtgcaggtcaaggggaaaagcatggcagctcaaggaaggtttttggctgagacatttattatcaacattgaaggacaggtcgagtcattctgactcctctgaatttcaaccgactgatttgcggaaaaatatcctggcatggaaattgcggcagctggaggccgcgctccagggacccaccgcggggtgtcagcaggacagaagcactcccagcccatttctcacgcttctttagaaatgcaaaaaaagtcagacattttaaaaaaacagctgatctggacaaaaggcagacccaggctctaacccagctacagaaaggaagtggccgtgccactgagacaggcggtcacagacacacgcagattggtctgtccccagagggcgcttggagggcagcggaaggattcgggcctggataggggcttgacctagccctcctcctcctcctcctcctcctcctcgaagtgggcttgcttcttccggacgttccaatgcaggcactgggcgaggctctcaaaccagtcgctcacggggtcccgcacacagatggaggggagcgggtagcatgaggtagtgatgctgatgctgggacgggagagcagcagcctgagccagggcttccagaaaggcccacccccggccaagaacccttcctccctccctccctgggaatggccgggactcttttcctgtggggccgggcagcccctccccgaggcaggcttgagcagtgccccatgggtgctgggacagagccatcccaggtcctggaggggacggtgcagggaactgacaaactctgccccagggccctcaggggtgaggtcccaggaggtgggtgggggtgggcagcagtgccaggggggacaccctcaggcctctgctggggccaggcctgcatgtgccaccgtatgcgacccgctgcccccaggacgggtgccccgactgtgatgctgcaagacccagggactcaggccctgtggtgccctaggggacaagctgtgtctacaggccaaccgcaagagggcaggcgctgcctggcccggggaggaggttggcaggcagcgcccagcccggcatgcagcccacacctgtctccatggcggatctcttgtctcttccgtccatcaaaggacacccatgctgtgttccttgcttcaggtgacagcatgatctgagggtcaagcagggagaggtgtgggcccccagctgtggggaggacgcttctaggcacccacccctgagtgctcgccagaggtcgaaggttgggcagctctgaccctgccttgcggacggtgcagtgcacgtcctacaggcaccggcccagctcagcaccgccagagaccaacaatggcagaaagcccctcagacccgggccctgggcaccttgatggacagaactcgggcaccagcaagggaaggcttgcatctgagggggcacaggatggccctaggatgacgaggccgcgtctgaggctggagccagcatggcagagcggggtgctaggtcccggctttgtgttgcacggggtcaaatgactcacaaaccggaaaaggagtgtcgttggctctgaccttcagctcgacccctgcggggaccacgatgggccggaaggacagcgagtgggggcagatgggcgtgatcatgatggccggcacgttggggtggatcatggaggccccggccgcggccgcatacgccgtgctgcccgtcggggtggacacgatcactcctgacagggacaggcgcaggcgtcactcccgcccgagggacgctcagggccccaggacagtgctgcgggccttaccgtcgccctgcaccgtggtgatgaggtgtccgtccaggtagacatccacattggacaggtaggaggaggggcctctgtcaatcaccacctcattcaggacctggaggggcgacagcattgcacactcagggcgggggatgccgcacggctcgcagacaccctccgtctcacccagccgggctctccggaaggtcctcatccctgggaccgaagtcgccccaccctgggcccctcaccgaggccgaggcgcctccactcacctggtactgcatggcctgcttcccgacatccatgtccaggcctgcagcctgcgagccgttctcacccagcccattgtgcacggccgtcttcttcccccggagctccttcaccaccctgaccttcagccgactccggagaacaacagctgcgttccctgaggtccagcaggagtcagagggcatgcatcagggaagtcagtggggtcaggggccccaccccagggaggccagtgggagtcagagggctctttcttctcccaagttgacacacttctgtgcctttttctttttattttgagatggagtctcactctgtcacccaggctggaatgcagtggtgtgatcttggctcactgcaacctctgcctcccaggttcaagtgattctcctgcctcagcctcccaagtagctggaactacgggtgcgcaccaccacgcccagctaatttttgtatttttagtagagacggggtttcaccgtgttggccaggatggtctcatctcttgacctcgtgatccgcccgcctcgacctcccacagtgctgggatgacaggcgtgagccaccgcgcccggccgacacttctgtgccttctgagagtgagaatcagctcacttctgcccaacacacatggcagcttcaacctgtgatctgctgaaacttctcagtgtcagtaaaaggtttgaaccactcaagatttagaaatccctgaatcttgaaacctttaaatgttgctccatgcatcattaaatgaaaataaaccccccgcaagcaagcgagacagcagcgccatgatcagagctcctgtgggctccagaacattccaactcaccctctatcacctgagtaacttgggactgaaagttctcaaagctgaatggggtcaggaagcccagggagcccaggtggaaggccatgaccggagggacgctgccctgtgagccgacggagaggtcactcagtgcccacgccgtgcacccccgcaccacccagctttccagcagcacctcaggagggacccagctctgtggggacagcaccccgaccctctgcaggagggactggccatgtggacaagcggagggggacgtcgcaggccagggtgggccgggccaccagggccaaggttggtgtggggagctggtgaggaacaaaggtggcagggctgagcggccccctgggcacggagggctgggggagctggcgagggcgggtgggaggcagccttggggtcggagcctcgcgccccacaggtgctaatggggagatggggagaaaagcagggcgggctgcgggcatttccggtgtcaccaacatgcagtgggccaagggcagagccagggtcccccacacagcgtggccctacagccccaggggagagctgtgctgctgagaaaccaggaagaggagctcaagggaggcccagaggggatgggccagtaggcgaggtcgtttcccaggacccaccaccctgcgccactccctgctgtcccaggcgggcgctggccacccccagccgtagcactgtgtccacactgcccctggccccaccgtcgcaccccaccgggctgccaccatgggcctcagtgctggccgctctaggtgactgctctcgtataaaggggtgaaaagcaatggaagccatgcttgtgagcccctcgttacgcagcacctagactagaacctggtgtgggtctggaaatgtcagcgcttcacctggaaaagcgaggaagcgtacagcagcgtcccgtctccccccaggcagatgatgaagtctatctgattggaaatgtcatcataatctaggaaacacaaagcaaaaccaagaagaggctgtcacacagtggcccctctgtggcgcagtgcgcagacaccaatgacaagggcaacagtgccagaagcttccaatggggcggggaactgtgctggagaaaccaaggacagagctgctgacagcccaccttctcgaaaggtacagaatttcttcttcactgccccaaagctttcatcgctggcgatggcagggtcttctagcactttcttttccacatacacgatcatgttctcctggaagcaaagtgccaacctgctcattccacctgcagaccccaccctcctgcagggaggttcccgactcacgggcgctgtggtcagagacctggcatcgtggcctgcatgcccgcccccccacgctcacgctgaaacttcatcaccaacgcgccaggaggaagcaggacctttaagagatgactgggcggagggggctccctctcaggaattgactaaggctgttatttcaggagtggctttcctgggcgccgcaacccccacgcctgctcttctgaagagaagacacagcaggaaggcccacgtcagatgtggccccttgatctcggacttcccggcctccagggccacgagcccaccagctcattgttggtcacccagtctggtgcttgccatggcggcacacacaaacccagacacccggcagatccccactcagtccccagttccagacaagcagccgttgcccagcacttgaggtggttcccatggtctcacggggcggtgatgtggatggaggcccccccaactccatgtgcaccccaggcccccttcccccctgccccgcgtgcctccatgaggtgcgtgcagagctccttgaacggctgcagtaggctggcatctctcatcttcttgatgacaaggacgctctttggggacttgttccacgtcagccgctggctcgcggggtcctgaatgtgcctttaggggaggagaaaagagttcacaccagctgcgatctccctcttgcggaaaaggtgtatgacttagaaaataaaaaaaaaaatctttaaaaaggtgttttcacctcccagggaaacgtgctcggtggccacgggctcacagggcctagggtcgcgccacagagacagggtcaggggtcagtagggtccggagtgaccacctctcacctgcttggcccatcacacgcaggctcaggcccacaacccccacccgggcaccacgctgacccaagtgcacgcaccacagcccttcccagcccccggccacttgcctgcctggctcctcagtgacgctggtggggcagaaatgaccacgaaagcccatggctgggccactctttgcttgatgccctcctcaggcccccacgaaaacccaaaccagttgacatggtgactctgtccctaggatcctctgcacacagtttctggccccacgggagcccaggacccctcaaggacccgcttccccccctgcacacagctcactacctccctgcatgaacggactttaacctcactcactctcacagtaaaaatcacaggtttaaaagtccgtggcagccctgacacagccacccgcgctttgctggctctgaccccgaccactgtgcccggtgtttctccacaggcagggcccaccccggtgggattcccattaccacgttagtcacagaaaacatcccagcccagaaccgggaacacacaccacggagcctgctcctgttcccagaagccaagggagggcgcagcggggctggccaccgtcgtcagcgctcaccgcctatcctcagccccaaaggacaagttcttataccaccgcgccagccagctagttccaagttgcccaatcgagaaagctgctgcctgccatgcctcttcccagcagtgacttccccaggagtgtgaccgtcccactaacacccccagaaccacaacacagacgccgatggcagccacagggccacagaccttagcccatcgcttgtgaccttcggaagctggtcagcactcaccctgtgcaggcattactgggaggcgtggggtcactcatgccatcccctatgagctcagcacctgccgggtcacacatgtggctcgcgaggtagcccctgcctgctgggagccggccagtgtgtccacagcatccaggccacgcttggcgaacacgcggccgccccatcggtatggtcctgactgtgcgcccacactagaagcctaagctcttcatactcaaaactcaaagcaaaacacaattgtgatgagacttggtaaagttgttgtaaaagcaactaagtcaaaagagcttcctacacttataaaaatcaaacaaaacaaaacagtttcctcattggtcacatggtcctcctgcctaatcccttctgaaaaaaagtcctcagttcagcagcaaagaggccacacttcagctccctgctcctaactgagccgggtgggaccaagccctctgttcccgtggcctcagacctggccaagtacccagcctccagcctcgccccagcactgcgccagccaccgctctggcccgcggaaccggctgggccccagggaaggcaccctcaggccacagtcaggtggaagggcgttccctgcctcctagcccgctgcgtcactctgcttggctccggcccaagggcgtgcaggtggctcacggtcctccggcctggtcagccagcaaagcccccgccctgcacacggctccccctgctctccccgccaacagtcaccactgacccagtggcctggcctacacccattccagccctgaggctcagctgagcccagccagagccaccagcagcggcgtcgtacaccggcccaggcacccaccgctgtgtgtgaccacaaaccagcgcctcgacctcttcctgggtcacctgcaaagcaggacaccagcccttgcaggcacgcacggctgtgggtactgcacggagagggcagggggtggcgtgaagcttgcaggcacacacggctgtgggtactgcacggagagggcagggggtggcgtgaagccagcatggccacagcctggcccgcctggccagctcctactgagactgtctcacacatgggtggccacgcacactgtgacacacgggcactcacgcacctccacaacacaggcccaccaattccctggacaacaaaacaggaagcgggtgccctcctcaccaggcgcccccacagggtcttgctctggactatcagggaagacggaagttcagatgcatgggaagccctgcccctccacagcggggatgggaagcgggaggttatgatcccagagacacagagcccagagggggcgtgctcccatgggggtgccgagaaagctgcatgcccctcaaggctgccccacaaacccaccgcttcctcctgcggggctgtctggcctcgggcagctcggggaccactgagtacgccctggtctgagggctgaggcagaacatgcacctgtccggtgaccccgccctggcccgagtgactgacggctggtgaaggcagcagctgagatgcgagtgacaaaggagtggctctgccaggaccaggaagtgcagggagggcaccaggcagcgggggagaggcccggtggggtgccagggacacagcaagcacaggatggcgggacagagccacggcggggccgggagggcagtggagcactctgggtcacccacgtggctgctgtgcagggaagggatggtgaggccgcggcgagtggtcaggagtccacacagcggagggcagccgggcaatagtgcaggggagctgcttggatattttgggatcaaagtgacagaatctgcagatggactggatgagggaaagcaaacaggggtcgggccccccgcctcaggcatttggcagcagtgacaggtcacagacactccgggaaccagtggcactgaaagggctgggcctcaaaagcacaagtgcgagtcacttccatcctaaggggctccgtcagcgtctggagcagcaaggccaacccccgtcctgcctgggacgcacgctgccgcggggcccacactttgcagagcagctcctcggatgactcccccgtggctcctgggacctgaacttcggtgacagcccagggctggggcctccgtccctgctgtgcgcccccagcctccatggcaccggtgcctgtcagcaaagggccatgcagtggccgcccccgtatcacacggccgcattgcgctttctggtcaacagtccccagcagcctgcgcgctggaacactcggcccttccgcatggtcctcccttgcagaaagtgaagcatccatgactccgtgaaggaggaggccctgaagagagcccgttctgcacagaggaagagagcccgttctgcacagaggcctgagagctgaggcaccagtcccagaagcaaaggcttctctggggaagaggcaatgaggatgtctaccaggtgcagaatacgactctcagggctggctgggagctcacttttttctctggagacagtcttgctctgtcgcccaggcggaatgcactttgataatcacagctccctgcaatctcaacctcccaggttcaggtgatcctcccgccccagcctccttggcaactgggactacaggtgtgtgcaacgatgcctgctaatttttgtatttttctgagtctgagtcttgctctgtcgcccaggctggagtgcaatggtgcgatcttcggcttactgcaacatctgcctcccgggttcaagcagttctctgtctcagcctcccaagtagctgggattataggcacgcgccaccatgcttggctaatttttgtacttttagtagagatggggtttcaccatattggccaggctggtcttgaactcctgacctcgtgatccgccccccttggcctcccaaagtgctgggattacaggtgtgagccaccgcagctgaccaatttttgtgttttttgtagggatgggctttcaccatgttgcccgggctggtctcaaactcctgggcccaagtgatctgcctgcttcggactcccacagtgctgggactgcaggtgtgagccactgcgcccagcctggattataattctttacacataaaacacagatatcagatcgatcactgttgcgtttttcccatgacactatgacgggcctccaggcagaatgtgttgacaaactgaaccatcaaatagcaaacgcaacccaccccagaattctcactcactcttaaagaaacaaaaaggcagccctgaggatctcatgtggaagccgccacacccacgggctgtgacccggtctccaggccccggctcgcctgccgtccactttctcaaagccactggaaaagccacagctggggagcccccgctcggatgcctgcactcagggggttcagggaggacgcccatgtggctttttgtttaaatgacctaaacatgtacttctcacatgaagtgctagaatcttcctcaacacagcgatcccacaactccacacacatcccgaggactcccccatcccatggcccccggcactcacatgatggtctaggggttctctcccttccaagaaccccccgtcctggggccccagcactcacatgatggtctgggggttctgcagcacacaggcctttggtccaaaagtggtcaccgggcatggcccatgaagagagcgtgtcctcctgtggggagagggcagtgtcagagccaccagggcctgaaaccagacatgcagtgacagacacagatacagaggaggttacacggtaaggcatacatgcaatttgaaagatgccaactccatctgcccagcagccacacaatagcccttggaaggttctgcccaggtccatggctgcactggagcggcacctgtgaggagcacgcatgcccacgcgccgctcagatcatgacccaagccggggagagcttcagcccaaacaaggaaaatgccagggccagggccagcctgggatcagaattcctcagtgtctccaggacccctctctagatctgcatttgggactcaaaacctgagacaacatctcatctctaaatcgtctagattaaaattctagcacaaatgttcactctgaactcatgtcaataaaaaagacgtaggccgggcgcagtggctcacacttgtaatctcagcacttcaggaggctgaggtgggtggatcacgtgaggtcaggagtttgagaccagcctggccaacatggtgaaacccccatccttactaaaaaaagaaaaattagccaggcctggtggcgtgtgcctgcagtccgagctactcaggaggctgaggcaagagaactgcttgaacccaggaggtggtggttgcagtgagccgagatcgagccactgtactccagcctggctgaaaaaagtgaaactctgtctcaaaatgaatgaatgaatgaatgaatgaatgaatgaataaaagacgccagatgaacggctcaacaactttcctagtgatttaaacatggccaggtcacagttaaatcacccagccaggggctgtggcagccgcacgcgtcctggggagaatgctgtcaggaccgctgtgctcctcagggtccagcactgaggctgccctcgtcctaggtgcccgggagcctcccagtcccttcacaaactcagaaaacttgcacacagctggccaggcaacggcccaacaaaatcctcaagtcccaatgcagaagaacggccttccgctgcctcgcagggccagacaaccccaggagagccgtggtgccctgagggctgctccacaggtgacacaggcgtggccatcagtggtcacggacttgtttacctcagccttttaaaaattggtaagtacaggccgggtgcagtgactcacgcctgtaatcccagcactttgggaggccaaggcaggcggatcacgaggcaggagattgagaccatcctggctaacacggtgaaaccctgtctctacacaaaaatacaaaaaattagccgggcgttgtggctcacgcctgtaatcccagcactttgggaggctgaggtgggcggatcacctcaagtcaggtgttcgagaccagcctggccaacatggtgaaatcccatctctactaaaaatacaaaaattagacaggcgtggtggcatatgcctgtaatcccagctactcaggaggctgaggcaggagaatcacttgaactcgggaggcagagcttgcagtgagcctagatcacaccactgcactccagcctgggcgacagagcaagactccatctcaaaaaaaaaaaaaaaaagaagaagaaaacgaagtacattacaaaagaattttacttacttacgaactgaaaagattattgcggaaaacaatgtttctcgaagtgggtgttgggatttaatgtttccttcccaaggacaggctatgcttgggcgtatttggctacctcctcccccacctcaccctgaaggcgcctgtcactcactatggaggcgacctctgacccagggctgctgtcatcaggttcagaatgcaacagaaatggtgcattatgccaaagaacccacaggaaaaaaaaataaaaccccaaagcaattctgttcacgcagtcactgcgctggggtggcctggaggtacaggacaacgacccccactgacaacgaggcaacgaggcatctgagaaaggctgagtggtgacgtggtgcctgcgggatgaaggcagccaccagcgctcgtagcctcctggctcaggcagcgactctgtagacagaaaacgtgggagtagcctgtttctccacggctgccaccacgtcagaggcgctacaggctctcccatctcactgggtaagacaacatgctttctaagactacttttcaccaaaaagccccccttgcatttgatagtcgtgatccttgttaggcagcgccggctctggcaagcttccacctaaaactcaccacatttaccatcaccagaaccgagagcaccatccccaggcaccatcacagctgtgcttgtgcggccaccgtcatgcaaagcccggggcgctgttgcccaagcagcattgtgcaagggtgagcgctgtgggcactcttggcacaggagggagccacttgcccaacatgtgagagggctgggcccgcccaaggccacgctcataactctgcctccaccagccctgctcacagtgcagaaccccccagccttcgcctctcaaaacaagcagagccaagagggatgtcccctcacaccccagtgacttctgtagagcaaatgtttccaggccaggcacagtggcttgcaccggtaatcccagcactttgggaggctgagacgggcagatcacctgacgtcaggggttcaagaccagcctggccaacatggtgaaaccccgtctctacaaaaatacaaaaattagccgggcatggtggtgcacgcctgtaatcccagcttcttgggaggatgaggcaggagaatcacttgaacctgggaggcggaggttgcagtgagccaagattgcgccactgcactccagcttgggggacagagcgagactcagtctcaaaaaaaagtttcctctccaagtgcgcttcagtctaacatcaagggtcagcgtaggcgccagttagatggttctgtgctgatacagacagatagagaaacacggtggcaccctgtgcctgtgctggcacctgggaacgtgcgccaggcaggtgtccatgggccaggatcccccttcaagggcacagcttcacctgggcaaggacccagcctcaccttccggatgcatcgacgcagactactcaggagaattcttcataatcgttttaagaaagaatattatgaaatcagacgagaaaaaaaagaggaaccatccctcccagttgtacctgaactccttggtgctccccagggcgggcgaggcagacaggctgcgagacttggcccggccccggatggggtggttgtaactccaggtctcatcgccgtggcaggccgagcagcagtaagcagccgcgtctggactcaattccttattcatggtcattttttcttgttccatttccattgtcaggaaatgagaacttcggtcagaaaaacactgatgccttaatttaataaaataaataatgtaaataaagtaaataaatatgtatgaaacaataataatttacacatacatatgttccatttcatcaaggggaaaaaatggctgaagtccaatttaccaaagtactttgaaaacagactgtttccattgcaaagatatttaagaactactctaggtttttggctgggtgccgtggctcacgcctgtcatcccagcactttgggaggtagaggcgggcagatcacttgaggccaggagttcgaaaccagcctcgcctgaccaatatggtgaaatcccgtctctactaaaaatacaaaaattagctgtggtgggcgcctgtagtcctagctactcggtagactgaggcaggagaatcgcttgaacccaggaggtggaggctgcagtaagtcgagatcatgccattgcactccagcctgggtgactagagtgaaacttcatctcaaaattttttctgtaaaataatattaacaaaaaaaattgtttcaaaaaagaacaaaatagaaagtcacactgtgtggccaggtgtggtggctcatgcctgtaatcccagcactttgggaggctggagagaaaggatcagttgaggccaggggttcaagaccactctgggcaacaaagaactcttctctagcaaaaaaaaaattagccgggcatggtagcccatgagcgagaccctgtcttaagaaaagaaagactctggccaggtgcggtggctcacctgaggtcgggagtttgagaccagcctgaccaacatggagaaacccccatctctattaaaattacaaaattagctgggcgtggttgcgcatgtctgtaatcccagctacttgggaggttgaggcaggagaatcgcttgaacccgggaagcggaggttgtggtgagctgagattgtgccactgcactccagcctgggcaacaagaacgaaagaaactccgtctcaaaaaaaaaaaaaaaaaaaaaaaaaaaaaaaaaaaaaaaagacaggctcttttctcgtaaacaatacaacacattaatgagagagaaagtgtgcaatttcaaataccctagtccagaaaagctgtcaaataaaattgaaccagcagatatgttgtgaactccatgccttgcatcgtgaattcagcgccaatgaaatatttaccaaactgaccaatattaagcctcaaagaaaactggtgaggatagaaaacctcacccttttttcccctttttctttttctttttttttttttgagacaggatcccacctcagccttccaagtagctgggactacaggagtacagcaccacgtccagctaattttttttcctttggtagagacagggtgtcttgctctgttgcccaggctggtcttcaattcctggcctcaagtgatcctcccaactcagcctcccaacacagtgctaggattataggcatgagccaccatgcctggcctagaacctcatctttttttttttgagacagagtctcactctgtcgcccacgctggagtgcagtggtgtgatcgcagctcactgcaacgtctgcttcccgggttcaagtgattttcctgcttcagcctccctagcagctgggactacaggcgtgcgccaccacgctcagctaatttttttgaatttttagtagagatggggtttcaccatgttggccaggctggtctccaactcttgacctcaaatgatctgcccgcctcagcatcccgaagtgctgggattacaggcgtaagccaccacgcccagcctagaacctcatcttctgaccacaatacaataaaaccaggaagagatagaaacaaagaaaagccctcagccacttggaagtttctgaactttctcttaagcaacccagggatcaaagtgaagatcagacccaacatctggaacacccagaagctggaggtgacataaacaggctgccagggtcggttcaatcccatcaaagctgggtcacagcccatgggaaaccatgaactgagcattcaagccaataaagccagaaatagaataaaacaagcttcagaagaacagaagaggggccgtgcacagaaacaataaaaatcactcaacagaggctaaacacacaaaataaagccaaacataccttctcattaaagaagataaatcttaatgaggacaaggtagattctggcattaaaaaggataaatgtgacattatggactgaatgtgtcctccccaaatttattttttatttttattttgtagagacaaggtctctctgtgttgcctaggctggtctcaaactcctgggctcaggtgatcctcctgccttggcttcccaaagtgcttggactataggtgtgagccactccacccagcaatccccccaaattcctacattgaagccctaacttccagtgtggctgaatatggaggtgggcctctaagaaaggagttaaatgggcgcggtggcacacatctgtaatcctaacactgtgggaggctgaggcgggcagatcatctgaggtcaggagctcaagaccagcctgaccaacatagtgaaactctgtccctaaaaaatacaaaaattagccgggcgtggtggcgggcgcctgtaatcctagctacttgggacgctgaggcaggagaaatgcttgaacccaggaggcagaggttgcagtgagccgagattgtgccactgcactccagcctgggccacaagagcaaaactccgtctcaaaaaaaaaaaaaaaagaaaaaatgaggtcataagtgtggggtctgatcagacagaatgagcatccttgtaagaagagacaccaggctaggcacggtggctcactcatgtaatcccagggctttgggaggctgaggtaagaggatcacttgaggccaggagttcaggaacagcctgggcaacatagcaggattctgtctctacaaaacaaaaacaaaaacaaaaccaaaacaaaaacagttggacacagtggtgcatgcctgcagtcccaggtacttggaggctccggcaagaggatcaatgagcccaggagtttgaggttttgcagtgaactgtgattgtgctgttgcactccagcctaggcaatagagaccctgtctcaaaaacaaaacagaacaccagagagctctctcctcacctctgttcccaccctcactgggcacaaaagtaaagccatgtggggacacagagaagatggccattacagtgagaaagagagtctttacgatgaaccaaattagctgggaccctgaccttggactcttggcctccagagctctgagaacaaacatttttgttgtttacccgccccctgccccatgcctgtggcactttgttacagcagcctaaataaaacaactaaaatatgtgagatgatggcaaggtgggcagaaggaaagttcaggaactatggacacaagactgtgggccctatgctacggtcaaagccaacgggttctctgaatacccaaaagctggttctctctctggctgcattctacaatcaccttaggagcttcaaacaacaccaattcctacgtgccctccagactgaatgatcagaacctgaaggtacagcccaggcaccggcactttaaaagagctccccagaagattctaatgtttagcgagaattgacagtactgtcccagtgggtcaatatctccctagcttaagacataccaggcgggatgtggtggctcacgcctgtaatcccagtgctttgggagaccaaggtgggcggatcacttcaggccaggagttcaagaccagcctggccaacatgatgaaaccctgtctcgactaaaagtacaggctgggtgcggtggttcacgccagtaatcccagcactttggaaggccgaagcgggcagatcacctgaggtcagatgtttgtgaccagcctggccaacatggcgaaaccccgtctctactaaaaatacaaaaaacaattagccgggcgtggtggtgggcgcctacactcccagctactcaggaggctgaggcaggagaatggcgtgaacccaggaggcggtgcttgcagcgagccgatatcgcgccatggcactccagcttgggcaacagagcgagactccgtctcaaaaaaaaaacaaaaaacaaaaaacaaactagccgcgtgtggtggcgcgtgcctgtaattccagctgctggagagggtgaggcatgagaattccttgaacctgggaggcagaggctgcagtgagctgagatcgtgccactgcactctaacctgggcgacagagcaagactccatctcaaatgaaaagaaaaaaaaaaaaagaaaaaagacataccagtgttttattcaaatacatgaaaaattcggccagacacggtggctcacacctgtaatcccagcattttgggaagccgaggtgggtggatcatttgaggtcaggagtttgagaccagcctgaccaacacagtgaaaccctgtctctactaaaaatacaaaaaaagggctgggagcagtggctcttgcctgtaatcccagcactcaaaacaaaaacaaaaacaaaaacaaaaacaaaaacaaaaacaaaaaaattagcctggagtggtggtgggcacctgtaactccagctatgcaggaggctgaggaaggagaacaggagaattgctggaacctatgaggtggagggtgcagtgagccgagatcgcaccactcactccagcctgggtgacagagtgagactctgcctcaataaaaagaaaaaagaaaaaaagaaaaaaaaaccatgaaaaattcaatgaaaaccagaacctacaaaaacatgtctggtataactactcctattgaggactatactagaggccacagccagtgcaataacataagaaaaaaataaaaggtacagtgacagaaaaggtttggcatgaaatgtaggtctgttaaacaaaataagaaaaggaacaagtgaagttgtacttgcagatgacatgacatttctatgtagaaaaacaaataagtgagtttattagcaaggtttcagaaggcaaattcaatacacaaaaatcgcctgtatttctatatactagcaatagacaacaggaaattgagaccatcctggctaacatggtgaaactctgtctctactaaaaatacaaaaaattagccgggcatggtggcgggtgcctgtagtcccagctactcaagaggctgaggcaggagaatggtgtgaacccaggaggcagagcttgcagtgagcggagatcgcaccactgcaccccagcctgggtgacagagagagactctgtctcaaaataataataataataacaacaatataatttacagctgggtgtggtggctcacgcctgtaatcccaacactgggaggccgaggtgggtggggatcacctgaggtcaggagtttgtgactagcctgaccaacatggtgaaaccctgtctctactaaatataaaaaattaggcaggcatggtagcacatgcctgtaatcccagctatttgggaggctgaggcaggagaatcacttgaacctgagaggtggaggttgcagtaagccgagattgcactgcagccttggtaacaagagtgagatttcatcttataaaaaaaaaaaaaatatatatatatatatatatacacacacacacacatatattattaaaaatatatatcttattaaaatatatatacatatatatgatctataatagcattaaaaatataaaatatgtggggatatatttggcaaaagacatgtcagaactgcacactgaaaactacaaaatattgctgacagagatgaaaggaaacctaaataaatggagagacataccatgttcatggattggaggactcaatattgagatcttagttctcatcaaattgatctgcaaatgttacccaaacacaaccatcaaaagccaagcaggcttctctaaaggaaaggacaagctgataaaattcacatgaaaatgtaaagtatctagaccagctgaaaaaactttgaacaagaacaaacgcgaagggctaagttcatgacttgttgaaaaactacgggaaccagacagcgtggcagcatcaagacggacatacacatcaaggaaacaggacggccagcccaaaggtagacgccacagaccctcacacacatgcagtccatgaatttttgacaggtgctgaggtgattcaacatgaggaggatcatcttttcacctaatagttctgaacaactggacagccacgtctaaaagaacgaagcccaaccacttcctcatactacatacaaatattaactcagaatggattatagacctaaatgtgaggactaaaactatgaaactttttagaagaaagcactggaaatttttttttttttgtctttttgtgagacaggatctcccactgttgcccaggctggagtacagtggtgtgatctcagctcactgcagcctcaaccttccaggctcaagcaatcctcccacttcagcctcccaagtagctgggattacaggcatgcaccaccacacctggaaatttttttttttttttggtggagatggggtctccctatgttgcacaggctggtttcaaactcctggtctcaagtgatcctcccaccttggccttccaaagtgttgggattacaggcgtgagccacctcacccagctggaaaaagtcttagtggtgtttaaaatcttttatacttaatggaaccctgaattttttttttttttcctgttttaggcagggtcttactctgtccccaggctggagtacagtgatgtaatcatggttcactgtagcctctacctactgtgctcagacaatcttcccacctcagcctcctgagtaccagggactacaagcatgcaccaccatgcctgactaatttttgtatttttttgtagagatgaggttttgccatgttgcccaggctgacctcgaactcctgggctcaagcaatctctctgcctcagcatcataatgtgcttggattacaggcatgagccactgtgcctagccaaaacactgttaagaaaattaaaatacagttgggtgtggtggcttgtgcctgtaatcccagcactttgggaggccgaggcgggaggatcgcttgagtccaggagttcaagaccagttctgtgtcttgctagtggttatataattaatttaagaggtaacactgcatagagccatacacacatgtaaaactggtgaaacctgaataaggtctatagtttagttagcagtatttcaattccctggttttgatattgtactatggaggtgtatggaggtgtaagatgttaacacaagggccgggcatggtggctcatgcctgtaatcccagcactttcggaggccaaggcgggcggatcacctgaggtcaggagtttgagaccagcctgaccaacatgcagaaaccgcgtttctactaaaaatacaaaaaatcagcccggcgtggtggcgcatgcctgtaatcccagccactcgggaggctgaggcaggagaatcacttgaacctgggagggggaggttgcggtgagctgagatcacgccattgcactccagcctgggcaacaagagccaaactccatctcaaaaaaaaaaaaaaaaagatgttaacacagagggagctggtgaagggcacaggggtctctctgtactatttttacaacttcctatgaattagtctatgattattttttttttccccagacgaagtctcgctcttgtcccccatgttggagtgcaatggcgcaatcttggctcactgcaacatctgcctccagggttcaagcaattctcctgcctcagcctcctgagtagctgggattacaggtgcccgccgccacacccggctaatttttgtattttaagtagagatggggtttcaccatgttgaccaggttggtcctcaaactcctgacctcaggtgatccgcccgcctcggcctcccaaagtgctgggattacaggtgtgagccaccgcacccagccaattatttcaaaataaacagttaataaaggtcagacacagtggctcacacttgtaatcccagcactttgggaggccgaagcaggggaatcacctgaagccaggaattggagaccagcctgggcaacacagcaagaccccgtctctacaaaaacattaataaaaaataaacaaatcaaaatcacaaaatgttaaaaaaaatgtattattactgctacattacctagaagctctattttgtgtgtgtgtgtgtgtgtgtgtgtgtgtgtgtgtgtgtgtgtgtgtgtgtgtgagagagagagagaaatagagatattgagagactgagaggtagggtcttgctctgtcacctaagctggagtgcagtggtgcaattacagcttactgcagcctcaatctcccaggcttaagggatcctcccatgtagctgagactacaggcatgagccactatgtccagctaatttttaaattttttgtagagacagggtctcgctaccttgaacgggctgaccttgaactcctgggctctggtggccctcctgtgttgacctcccaaagcattgggattacaggcatgagccactgcacccagcctagaagctctgttcatatttatttgcgaagatcaatttgatgactaagcagtaaactaatttataaaataatattaaatattaaaaccaactttaaacaattatcttcacctatgtatgtgtgtgtgtgtatatatatacacacacacacacacatatatatatatttaacaagtatctccaataccacaaccagtgtattttttgtttttttgagatggagcttcgctgatgttgtccaggctggagtgcagtggcgcgatctcggctcaccgcaaactctgcctcccaggttcaagcaattctcctgcctcagcttcccaagtagctgggactacaggtgtgcgccaccacgcccagctaattttgtatttttagtggagacctgcctcttaattctccaacatggaggggtttctccatgttggtcaggctggtctcaaactctcaacctcagatgatccgcccgccttggcctcccaaagtgctgggattgcaggcgtcgccaccgcgcacggccaccattatgcctcggcctcccacagtgctgggattacgggcgtggccactgcgcgcggccaccattgtgcctcggcctcccacagtgctgggattgcaggcgtggccaccgtgcgcggtcaccactgtattttttgacaagggtgagtcaggactgacacttaattcatttgtttgatatattaactgctttaaaaggacacacaatgctagctgcaccaaagtgcattcaaattcctcatagcatgaatctaattttaaaaaacctttgtagggcgggcatggtggctcacgactgtaatcccagcattttgggaggccgaggcgggcagatcacgacatcaggagttcaacaccagcctggccaagatggtgaaactccgtctctactaaaaatacaaaaaaaattagctgggcgcggtggcaggcgcctgtcatcccagctactcaggaggccgaggcaggagaatcgcttgaacccaggcggcagaggttgcagtgagctgagatcacgccactgccctccagcctgggggacagagtgagactccgcctcaaagaaaaaaaaaaaatcctctgtattaggaagttttattagaaaaaaatactagagcacaataagaaaatattcataacgaacttatacaaagtagcaaggaaaacattaagatgccaataaataaatgtgcaaagaacatgaacaaaagtcacacacacacaaatacaaacataatacacgagttcgttcccatgtaagaactcaatcaatatttgttgcaagactaaatgaaaaaggaaaatttatttagtgacagaaatggggaaacattcaacctcaaccctgagtgggaaaaaacttactgcccactaaattacccatctcatctcaccccggtaaataatgcccagtgctggcatgcacactggcagtatacaaactgagaaagactttctggaaagtgctacagccatgtgaccacagggcttcaccctgtgacctcattaaacctaagcagattacaggtctgaagggggctttctttagatgtggctccacctacttaggggcagatgaagaaaacaggggtctgggcagttctgaatgggaaggccaggcatcacctccctcttcagttgcacaaagtgtgcgtggcatcctcacatcccatctgcctcaatttcgctttttctctgaacacttttcaccatctgtctgaagcacacacacacattttattcacttccccattcccatgcatgaatgctaggacctttgcaattgtgggccaggaaagattgcaaatgataagccaccagcacagagagtagaaatgaaatcctggggttacaagctaaagcattactgacacccacttgtccagaacggctgaagctgggcggtgactgtcaacaggtatatacggactagaaagtggagctgctggaggaggccctgtaccttcctgccatgacacagcctccccccaagtgctgggcttgtgtgctcaacactccctcttgctgtcatcctaccacacctgcagactggaggtaatccagatgcaaggccgtcgagtcccgcaaacacccacctgcctcttaattttccaagtgagacctacatttcctcaagcgtgaagctcaataaaatcaactattgttttccgttttcatcacgagcgccactttccccctatttgttcaccgcctccactccacaagaactgctcttgacttggccaactttctgggacaccctcactacaaggatttatgagtcaaacaggtttttgtgctagcctggaaatctaactgctgacagcagttgtttcaagaagaaaatgctgttttggaaccaaacagcaggctgccaactgaaacaacataaacccacctccaagttcaaatgaaacaaacaaacaaaaagactggtccaagtgaggcaagctgtggtggctcacacctgtaatcccagcactttgggaggccaaggtgggctgatcacgaggtcaggagttcgagacaagcctggccaacacagtgaaacccgtctctactaaaaatacaaaaattagctgagcgtggtggtgggcgcctgtaatcccagctactcaggaggctgaggcaggaaaatcacttgaacccgggaggtggaggttgcagtgagccgagattgtgccactgcactccagcctgggcaacagagctagactctgtcttaaaaaaaaaaaaaaaaaaaaaagactggtcaaagtggcttacgtctgtaagatcagcactttgggaagtggaggcaggaggatctcttgaggccaggaggttgagactagcctggacaacacagtgagactctatctctacaaaaaattttataaatcagctaggtgtggtggtgcaggcctgtaatcccagctactcaggaggctgaggtgggaggatcaattgagcccaggaatttgaggttacagtgagctataatcatgccaccataaacacgcctggaggacagagtgaggccctgtttctaacatacacacacatatacacacagaaacatctcgagaggacacctccaaatgatgaagctattttgttgggtactgcggtggcacctgtgattcctcaagtagcttggaatcagcgtgctaacaccataaagtggctgcaaaagtcccagtgaagtcactgctgagagcaaacaggccttacagagaagttccaaggggacaggaaatttccagaggcttgagaggacaatgttcaggggaataagtacttgaagggaattatctaacaaggtgttaaagtaactagcttcttagacaagatgacatcaggaggaaaaaaaaacttattaaggcaaacatgtcagtttcaggccaactaaggctgtcagagagacatggaacacaagaagagaagagttttgaaatgtattcccatcaagagccaagaataatgaacttttgaatgtaaaacttagtgtgttccaaaacaagaaaggaaaaataacttgttactcggaatcgaagccaaaaggaatctcattgcttggggaggagggatgggagggtgggggtggtccttggcctgggaaggaaaactccaccaggccttcggagctgggcacgccctgttcccacaattaagaaaaaaaacgacgacctagagctcaaggccggtgctgacatctgacctactggatggcagccgcctgtaggaacatcaccatagactattggaattttctggcaagtactgggcactaaatcagagatgtgtttttagagaattccatgccaatactgctgtatagaatcttttattcatactttcccactaggtttgggcccctctaagctttcacgagtcaaagacccctcctgcttgctgaaaccacccacggaaggccggacaccgaggacctggccgcccaagcagaggcgactgacaagcgcggtccgggctggacggccccaccttccccgcccgggagagccaggccggacagcggcctccctcagacccgtccccaaggccgagcctcgccctgggccgtgctggtgccccattcgggacggagcggtggcccgtcagcacttccacggcctcctcagcaggccagatgggcagggccggcctggtgtctccccgcctggccgcgcgctcgcgggcagcgatgaccccaggcagcgggcgaccccaggcggacggcaggccgggtctgctcactcaccgttcgctgccgcgggcgcctgcgggggcgtctacatgccggaccgagcccgcaggccccgccgccgcgccgccgccagccgtcgctacctggcccttggcgccctggccgcctgttgccccatggccgcccggaccccggcgccggcgccgccgagcagcaatgcgccgcgcccgcccactgcgcaggcgcacccgccacgcatgcgcgctgccgcgcacgtggggcgtcccgcgcgtctgccgggtcccaccggcgccgggacaccccgcgcgggcgggaggcggcgggcgtggcgggaaagaggcgggcggtggggaagaggggcgaatcgcggtggagagcagtgaccagggagtggaggcgggcagcggggacaggggcgggcgtccgcgactcgggtaggcgggggtcggcgccccgaggagggcggcccccggctcccgtccccactcacctgccgcgtccggagggcgcccccgggtccgcccgccacgtctacgcctaggcgcccccgacattgtgatcccagcccggcgtcccgcccccaactcaccgccaccgcgggcgggacctcccggaccacgtgggccggctcaggggagtgcaggtgccccgcgagagctggccccgcccgccgccgcttccctaattaccgggctgtgacacggtgtgggccgagccggatttgggaaccgaaacttagagcagctgcggcagcgctgcgctccctcggggctgtccgtcggggctgggagggcggccctgcgcctgggggaaccgcgatcggcctcacgcccacctctagcggccaggtgcgccttgcacgcccacgaacgtcctcagaggtctacgcttgggatcccaaggctggcagtggagggaggacccggtggcctggggcacctctagggggaccagggagccgtgttttgcgcaccccacaggctggaggactcggggagttgggggaggaggccaaagccacaggagcggactttgtagtgtttgttggaactgcgggtcccacccagcccgcacttgctgaactggtggctgctcatcagcgccttcaggcctcaaatatcccaataatgtgccctatacccagttctcagctctcgagtcactgtcaggtaaactggcaatgcacgaccagctgctctaacctgctggtcccccaggtgccagacattgttttgtttttctgagatagtgtctcattcgtcccccaggccggagtccagtggcgggctcacggctcactgcagccttgacctctcaggtgcaagcgatccttccacttcagcttccctagtagttgggactacaagtaggtcccgccacactcgactacttcattcatatatatatatatttgtgtgtgtgtgtgtgtgtgtgtgtagagatgaggttttaccattttgcccaggctgggtctcaaacttcacccgcctcggcctcccaaagtactaggattataggcgtaagccactgcacctggcccagccattgttttctgaggttcagtccctgtctatactttctgtgtgatcacctggcccagggtcggtgtggacctgagtcctctgcagcccttccccacacccgcatacctgctctctggtcaggactcctgggacttgaatccagagacacggaacacggcctggccaagtcttcctgaaaaacacagctcttcagttcaggaccacagtgaagtacagggcaccaagggtgactggaaagggaagcaaggatcatgagaacttgggggatttcttaagctctgtaacttctcccggggttattttgcaaacccaactgtttcaaagtgaccaccagccacacccacagaagcggccttgagctgcccagttctttttctttggcggggggagagggggcggataagatcattaacataataatgcgtgagctgagtttttgcatatgatcattagcataataatgcttgatctagatggcgcacccacaagccaggcactgagccaggcctcagtagaatcttctagagtggaggcagtcaactgcttctgcagaggcaaccagtgactgtcgtgggccccaggtcacacagcaggtgcccttcgcgtgtcccgctgtgtagggagctccagcagctgccccgtctgtggcatgaaaaccctttgtctaccctgggcctgggcactgcctgcaggagagcttccctgtttcagagatgagaaaacaaaaccagggctgtggtttccttcagctgacaggttgtgcaatttctcagggcaggccccggatatgaccttgaagattcaggggccaagatctcacacccacacctcaccccaggcctggccagcaataactaagaccaaagctgggaaggctccttagggcacccagaatggtccaagaggcagctttgcttgggctgagaccaaagggaagagatgttcccgcagcaggaacagaagggtccagggctatcatgggggcttctgccagatggtgcacaggaagaggctctgccttcaagggattgggggtcaggaaaggccccctcctgcctgaccaggccccagggatggggcagcagtgggtggcatcccctgccctgaccttcctcagccccagggctgccattgctcaaggtggcagtggactcttcacataatttcgcattgttttttgtattctttaaggatggctcccatgttgtttacttcagaacccccaaaacctggacccatcctcttctgggggtcagcagggatggggagggtggagggagaagggggaacggaggccatgagggatggagcaggatggggtgcactggggtacaggttgctcctggggaggctgaggagagagggaagttggcttcaggtggcctggctccagtaaactgggtgaacgaagtctgcccagaacccacaagggtaagtggcctggagcctggggaaaggatgactgggaaggactgaggctcccagtgaaggacatcagtatggcaggctatctggtcatctcatccagcctccagccagcacccggcacaggccctgcccaggctgaaagccaggataggggcgtctgcaggggccagtgtctggatctgctcacatgacagtcttctgtttggcctggtttggggcgaggggcaacctctttcccaggatgccagccatgtgcagggcatactgaggattcaacagtggaaaccaaagtccatcaggtgttcaccttctagtggggcagacgggcaagaagcagaattggtgggggcaggcaggggttggggtacagttttgaccaaggtacccagggacaagtgtttctctctcaggcagaggcagcagcaaggaccaggaccctgaagtggtgagagcctagagtgggcggggatcatcaacagtaaccacctggcaggactgggactccctgtgtcctcacaagatccttaccaagcagcctagtataagacgaagtctcgctctgtagctcaggctggagtgtagtggcatgatctcagctcactgcaagctccgcctcccgggttcaagccattctcctgcctcagcctccagagctggagttacaggcgcacaccactgaacccggctcattttttgtatttttagcagagacggggtttcatcatgttggccaggctggtcttgaactcctgatctcaggtaatccatccacctcggcctcccaaagtgctgggattacaggcgtgagccacagcgcccggccacagcctggtacgtttattgtccacatttttcacgcgggggccagaggcacagagaggccaagtaacttgctcaaggtcacccagcgaggaaagggagctggggggtgggggtaggggacagggcgaggccagagagtagtgggaggggccgaggcggcctttcccgggagcgctcggttcccggccggcccttctattggccccagtcactcaggctcccaggtccggctcgggggggagcggggggccgcgccaggccgctgaagtgtccccgtttcgcgtgggcagagcgcgcctccccacgcatcctgctgagggccagcctctgctaggtgcgtgacacggaggggacagaacggaaaccttgtcctgctcaagtgtggacgtgcgtgccacgtgctagagtaaaattgaggtggggaacctccatccctgggacatggagcacaggggcgaccccgcgccgcttggtcaaaggaggtccgaggccctgcaggaacagcccacagccggagcgagctgcaggtcactccactgcctgtgtccacctgcgacaggtgcgcccgcgcaagcggggcggagccaggtgacccggacacaggaagcgcgccaggggcccccacaccgcggagctgctggcgacaaagggcgctgctcctgcataggccaggctaatgcaatctacaaactagatttctgtgcctacagtttgaaaatgattgcagttcactcagccagtgtggaattatcctcctctttccacactgccttagtcagtgccgctgtccaagtgcacgttgttggcgcccgttttcatttcctgttttgctaagaaagtggggcagtggcctccatgcccgccaagggacaggcaggccgccccagggaggggtccccctcagctctggctcttccaggccaaagccaaggggaaggggcaccagagggtcccaggtcccacatgccagctccctcagtctgcggggtgccaggctaggacacagaagccaacaggaatccccaaagggaggaagtggagtcgggggtgtggcagccgtgctgagatgctcggcctttatttactctgggcagggaccaagataggccactgcaggccggcaccctgcctcccggctgctggagcccctccctcccaggaactgccagccaggaaagagcctcaggtactctctgcatttaatttttaattttttttttcttttgacgcctccaagacaagttcaactctctagtgattttaagtggggtttttgtaagacagctggcagggttagggcttgtgaagaacttgcatgtctatgaagaactgatttatttcagggaaaagtgggggatgacgaagccaggcgagcccaccccgttcagcctgccaatcacacccacttcagcagcctaaaacagcaccaggtcaccccaccagggagacaacgccatagtgtcacttgcagtgctggcagatgggcacccttggtggcgtcagaaacacacccagcaccttgcctggagcagggcggctgggccctgctccgtgaatcccaagtgccctatgggagcctctccggccagggactgccagcctagaggaggggctgctgggttctctggtgcccaggggaggagggggcctacaggtactttctgctgagagccttcttcacttactaggaaaaagtttggctgggtgcggtggctcggcctgtaatcccagcactttgggaggctgaggagggcggatgacaaggtcaggagatggagaccatcctggctaagatggtgaaaccccgtctctactaaaaatacaaaaattagccgggtgtggtggtgggcacctgtagacccagctactcggaaggttgagccaggagaatggcgtgaacccaggaggcagagcttgcagtgagccgagatcgcgccactgcactccagcctgggcaagagcgagactccatctcaaaaaacaacaacaaattagccgggcatctgggccaggcgcggtggctcacacctgtaaccccagcactttgggaggctgatgtgggtggatcacaaggtcaggagatcgagaccatcctggcaaacatggtgaaaccctgtctctactaaaaatacaaaaaattagctgggcatggtagcaggcgcctgtaatcccagctacttaggaggctgaggcaggagaatcgcttgaacctgggaggtggaggttgcagtgagctgagatcgcaccattgcactccagcctgggcaaaaaagagcgaaactccgtctcaaaaaaaaaaaaaaaaaaaaattagcggggcgtcgtggtacgtgcctgtaatcccagctacttgggaggctgaggcaggagaatcacttgaacccagaaggcagaagttgcagtgagctgagatagcgccactgcactccagcctgggccacagagcgagactccacatcaagggagaaaaaaaaaaaaagttccagctgctggagccatgggaattaaaaaattactttttttttttttttgagaggcagtcttgctctctcacccaggctggagtgcagtggtgcgatcttggctcactgcaaactccgccttcccgggttcatgccattctcctgcctcagcctccagagtagctgtgattacaggcgtgtgccaccatgcccagctaattttgtattgcctatttaagattttaaaaaatcaccagtttggaaagcagggaagtggatggttctggagcctaggagcggctatttgggacacacacagccatggttttccacactaccatggccagtgctcatttttttcttactagatgcagttctttatattcagaccaagaggaacactcagttcagtcccaaggaaagctagtctctggagtaacatcctcagacattctaagggagggaaatggcagaggagaaaggcaaggcagccgcctgtggagactcccacggtgctgtgggcaaggcctatgcctggggaggggtctgggcgatggcaggtggacctccctgctctgctggcctgtgaggtggagcttcccaggaacccctccgaggagccaatgcgccactcatggattctgtgacgtggtggcggccatggcaccgcctggcatgagcaggcccgtcagacctcacagcaacagggacagcttagggaagcgggcgcgttgcaaactggaagtggacccgtaaataatcaccacaccaaagtccctcatgtcaaactgctttattacatcttaaataacagtacagtttaatatagtatctatcttgcatccagcttccttgcagtacactgactttaaaattaaatacaaaaggtggaaaggggtaagggtgcagagagctctacagagttgttggacggaaagagaaagaaggggtttcatttgtattctctttgccagatccaggcctaccgcaaggtcacagcacagttttgtatagaatgttgcagaaaacaggatggagaagccactactgctgctatgaaggagtgcggggggcggggcggggggtcccacagaacctgctttccaaacgctgctgctgaacactggccttgaaatgaacaccaggacaatctgtgtgtgatgggaatgagccacctcagatgtggagggccctgaagaatccatataggagggcaggctcttcactccctctccctccctctctctccctccccaccctcagaatccaacagcagtcgtttgcaacagaacttttttttttttaaagaaataaagaaaacagtgacttatcccgctacccaagcgtgtagagccgcgcgctgtactgcttccgatatgtgccacagagcagcaacgagaagtggacagagccgcaatggttacaactgtaagaggttatttcttaaaagaaaaagaacacctaaggactgagtcccatatgcacttttgagcatttctacagcatgcgattctaagagtaaacccacccaatatggcaaacaatcaaaatttttaaaatttaacttagaaagtctgagatcattattttcaaaacattgatttgtacattgtttcatacacaaataattgactgactatccaagcacaggacaggcatctctcttgaaaacagaggttcctcctagttgggggtggggtagtgttaggctattataaacttccctccaacttcacaaggaaacccaaagtgagattaaaaactcaactgagaagatagacaggatgggtcaggaggaacatggtgctggatctgagctcacttttcagcaaaggtgaaggattctctgatcacgcatttgagaccgtccccgcatgtgcttggccccatggcttctgaacatgttcttttctatgccacgtttgtgtgcaacaatgatctgtgacatcagacagaaaattaaaaaccagggactgaatttacatcattgacaacatcagagaggctgccctagactctctggttttgattaactgttgaacacaaaggaatacattttaaaaaggaaatatgaatgcttccaaaatcttgctacaaacatgactgaaatttggacacgatgaccagatgaacaaagccctcagcatgttttgcatgaatgccacaaaacagggtcactggtctaaaattcaaatacactggtggaaaagtgtgtctgtctgacaattacactcaagtttaccttctggttaacatttttattatatatttccttttaaaattcattcaagacaaaaaagaaaacaaagacgatggccccggaaggaatgcacaatttgttttagtttacagcacagagatctttctctcaatgggaattgtgctcttggtttcagcaataagtgaaggaaaaaagatcttgcccttttgaagttctgaggggaggtgtagggtgtccacgttagtacggttggataggatatgctctcatggtaacgcgtccaagttggaatggtcttccagtctccatggcatccacatgctgttttaaacagagtttaaagaaatgtgaaaagaggcagagaatctaagtgcagacgcacagccaggtcactgctcttcccatcactgcatgagtgtctgcagctgagggcacgtgacttcagctttctgtaaacgtttcccacaacacaattccaaatcaatgctacatcaacatttatctagaaaccgttaatgacaacttcaaatgttctatgagaaacacgcacagttctcctcagagaagggcatttgggctgctgcattacctactggcgttagttccagatcttgaggaagctatcccaggaccctgtcgccacagccatgccatcgtcagtcacgcccaggcagctgacgcggttgtcatgcccagccaagacacctgggagcaaacaacagcagaatcacaccaaagcccagaggcatcgatctcacctgtgtgccatgttgtgacgaggacggatggtgcatctctcatgggacaagacccagagtctcccacggccaggaagggagggaaagttgcatccacgtggggaattaacctgcagcatatggccagccttgttaaaattcaaagacacgcacacacacgcaatcgataaatccagagcccctggcattgacttctcagcactcacttataaaacttaaaaaaagaagcaaaggccactatcaaaaaaatcaaaactatcatcagacgcagtggcttaggcctgtaatcccagcacgttggaaggccgaggcaggcagatcatgaggtcaggactttgagaccagcctggccaatatggtgaaaccccatttctactaaaaatacaaaaaccagcagggcgtggtggtgcgggccgtagtcccagctactcaggaggctagggtaggagaatcattggaacccaggaggtggagcttgcagtgagccaagatcgtgccagtgctctccagcctgggcgacagagcgagactccatctcaaaaaaaaaaaaaaaaaatcaaaaccgccccaatctcaaagcaatctgtaacacaggagcttagaggcatgagccgtttttcctttgtctgtgatccctagagcccagcacaaggcacagaacacaggagtagcgatggtggctgagaccactggcactgcactgtcactgtcatgtgatgagggggccttctgtcaacactcccaataaccttggcttggatcatcaccagccagaagctccacttcctcccagggggatccgaaggcccatttcagccaccctcctccacctcctgcagccaccacacagctgagtacaggggccggcgtgtgctctgccaaggcctgggctggcttccaccgcccttcaacagcactgtgactgtgagacttggctggaaatggctccactctggtccccccaggctggggagaaaaagaaatgtgtttaaccaggaggtgggagtggcacccatccggaagcaggaagccccggtaagggccaagacctggagccatgctcccttctgtcctcccaggtactgagacaaatgaatctaagtctgtaagtgtcaacagttctcaaattcaaatgcccaaatgaccatttttagtaaggaagtctcatcttttgtacacctggcaataacacgcttgcctttgatatgttaactgtaacggcacccagaggtgtccctgcatggaactcctccccctgaagcagagttcagaggggaaagcacggggctgggccctggagcctgcacagctgaccctctcctgcccactgactctccccagagccctccccgacgcatgtgggaagatctgctggtactcctcggagtccacttgcctggagggtcagagctgggccatcagtttgcgactgtcactcctgctacgccatgccacagtcccaccgatactaaaacactgcagcttatgcaaccactctgtgtttgctctaaagataccacgtaaatgtccacaagacacagaaaggccccatggccacgtacctgcccggtcggctttgagtgcatcccagacgttgcagttgaagtcgtcgtacccagcaaggaggaggcgcccgctcttggagaaggagacagaggtgatcccgcagatgatgttgtcatgggagtaagtcatgagctcctggtcagcacgaaggtcaaacagcctgcaggtggcgtcgtctgagccagtggcaaatgcattgccatttggaaagaactggaaagagaaagcaaatcaagacatcatgtaaacgctcagaaagaaacattgggaatatggattgctcaatggtagggctgcagagaacacagcaggcaaagaccagcaagactgtgctctggtaagaacagagggctgggccgggtgcggtggctcatgcctgtaatcccagcactttgggaggctgacgcgggtggatcacctgagatggggagtttgagaccagcctgaccaacatagagaaaccccatctatactaaaaatacaaaattagctgggcgtggcggcgtgcgcctgtaatcccagctactcaagaggctgaagcaggagaactgcttgaaaccgggaggcggcggaggctgcggtgagccaagattgcaccattgcaccccagcctgggcaacaagagcaaaactccgtctcaaaaaaaaaaaaaaaagggtggggggatgggggaggaactacaggggactgggatgggaggggatttgcactggggaggcacacaaacactgtgatcttggacactgtgattactgtccccaaagagtagaatttattccaaaggatagtgagaaagtagtcatcactgacaggtgtgcatgttgctgtagctgccagccatcagggctaatctcatggaggaaggagggaagcgggctgaccaaggctgtggtcaggactgcagcagagctctgtccaaccaacagatacatccttctaagtctcctcacaaggccaggggctggaaacactgcctagccatccgcgtgctaaagaggagggcaggttccctggttagctgtgcccctgaccagtaaggctctgtaaccactggtggcctgagttatcttactgtctttcccctccaggatcccaaccactgctcagctgtagaggtgggaacggggactggcatacaacaccctgtgagtatctgtgagacaagtggtcaacacagagaagtttcccatcgggagttttctgtatccccatctgtacatgaggttgtataaggatcagaaaggagaacatctaatccagaaaagtttaaaatttagcaatctgaacggctagcagagacggcagaggacccgaccccacacctccacccagactcacgcaaatggcattgatgtcagactcgtggccagtgaaggtctgccggcacatgccttctcgcacatcccagagtttggctgaagcatcacaagcaccagagacgaacagtctggtgtcaggagcaagagaaaggctcatgacatctccagtgtgtccggtaaacgtggtcgtctgctggccggtctcgatgtcccacagggcactggagcaggagcgaatgacaaggggacatcagccttaacttcttgggtggctagtcatgtgacagacaatctgtccttcaaaccacccagggccacagtgagcctctgcactgttactttaaaaacgtaaattgtttaaagacaaatttaaatgtaatacaactttggaagggaaacaaagcaaagcaagcaaaattatacagagatgagcacagggcctgggcttcagaatgacgggatcgctacctcaactcaaatgccagcaaacagggagctgggggcacttttcaagcagcaccactgaggctgtgccccctctttggtcatggatgggcatggaaggggtggcaggaagctacgtggaggccctggatggcggaggggacgcgactctatctgtggctgctccctctgtgccctcccttggcctcccctccacagggtctcagaaaaggcaggcaggagaaggccaatgccaggtaaacaaatggctcacagcaattctgaggtcctcctgccctttcctggaatcacaaacaggagagcagctgagttctcagtgatcacacctggtattttttttttttttttgagaccgaatttcactcttgttgcccaggctggagtgcaatggcgcgatcttggctcaccacaacctccgcctcccgagttcaagcgattctcctgcctcagcctctccagtagctgggattacaggcatgcgccaccatgcccggctaattttgtttgtatttttagtagagacggggtttctccatattggtcagactggtctcgaactcctgacctcaggtgatccgcccgcctcggcctcccaaagtgctgggattacaggcatgagccaccgcgcccggccatacctggtattctatcacatttctgcttaacaagctgtcaaaaggtgagacgctgacagagccctgcacagagcagaagcctggctcaggtgtaaggacagctgtgagggccacacgcccaccaacatactattctcctgtgcctcgacccatggaaggcaacaccagagagcactgtccgttcatgtcagcctcagaggaaagcctggctgggcctggcaatgcaaatccaatcagccaatctcaacagacactgcacagggagcctcctctctagggcctgagggactgactgcagaagggaagcaagatacgtaaaagagtctgaaaaaaatgattaatgaacagaagcactttaaaaatatcttctaataaataaagtcttctcaagattgacaatctaggtgacaaatcttttgtaaatctatgaaatttatacaacgaggacaccttataataccacagatgctttgctgacaagttggttaagggcccatgtctcggtgaaccccaccaactgcgtgactaggggtctgtgccctgggctgggcacagctcctgccaccaaatcatgcctcagaagaccagaaaaacccacatggccagctgaagtctaaaatgactctcataaaataactatctggacatttaatttagtactttgatgccacaaatgaaaaaattctagcatttaagtgggcttccgtttacctgtaaggtgaaaacactaaaaatgaagtctgatggaatcacttgaattgtgacgtctgttatttttagtctgtgctcattgttcacaatgacatgatgctatcagaaagggacaatcaaaacccaccctactcccacctatcatcacctaaggaggtacaaatatatagaggggaaaaaaaagaagagcaggtactttgagcctgattgtagttaaaatatctatgttggccaggcatgggggctcacacctgtaatcccagcactttcagaggctgacgcaggcagatcacgaggtcaacggataagagaccatcctggccaacgtggtgaaatcccgtctctactgaaaatacaaaaattagctgggtgtggtggcgcacacctgtagttcccagctactcgggaggctgagaggggagaattgcttgaatctgggaggcagaggttgcaatgagccgagatcacgccactccactctagcctggagacagagagagactctatctcaaaaaaaaaaaaaaaaagaaaaaaatgtgtattttagttctcagctgctgaaaattaaactttgtaaatttattagaagtataatgaggctaggcacggaggctcacgcctgtaatcccagcactttgggaggccgaggtgggcaggtcacctgaggtcaggagttcaggaccagcctggccaatgtggtgaaacctggtctctactaaaaatacaaaaattagtcaggcgtggtggcgggcacctgtaatcccagctattcaggaggatgaggcaggagaatcatttaaacccggcaggcagatgtcgcagagccaagattgagccattgtactccagcctgggtgacaagaacaaaactccatctcaaaaaaaaaaaaagtataatgaattcacacattgctactatgtgttttaaatcttaaggccacttaaattacagatggcctaatattatgtcaagaaccttatttcctccatgttcacagaggaatgtgccaggggctgtgggttctcaaggcactgcctgccccgggtcaggtacttaccacgtggtgtctccagagctggtgacgatctgattgtcatccaggaatcggcagcaggacaggtaacctggcaaagaacaggcctaagtgatgagctgaatccagcaggccttgcacccagcctcatacatagagaaacacattggcccggtggaagctctacgtctaaggtaagaccagcaccatgctagtgaccttttattcccatctgtgcacacagcagaaggtccacacgcactgctggtgagggtgagagcctggccaggcaggacagcacgtcccacagagacccacagctccgtgatgggggcagaagcagaaaccacacccatgaaacatacacatctttcatctgctttactgtttgacccatcaaaggctggggatccctcgtctatttactcattcagggcacgctgactccagtgcccaggaagcagccttaaccagacagacacctcctgctctcctacagcccacgctcagcagggacagagaatgagaatcactgaaagaggacatcagaaagggagtgctaggggaaggaagaggacaaagtaggggcctcacaagatggaagccaggagaggagggaggacgagagtagactcagagaaggaggatccaaacagagggcccagccagggcaggaggcggcgaggccacagggtcagggtggcaagggcctgcaggtcatggaagggataacgaaggcaacaggaacgcggcatggcagcaacactgcagacacgggggtgctcgtgaatatgtgtgggtgggtttgttttcttggggacagtggctgtgacacccacatcagcgtgggcacaattctgtgtctctgagtattcccacccactcccactgggaaggaagcatcagaggcgagagcaggacacaccaagatgccccgtcctaaacaacttccaaaatgaggaaaagcaacaacaaaaaatcagtccgcaatatccacacatgatgactggtctctactaaaaatacaaaaattaagcgtggtggcgggcacctgtaatcccagctactcaggagggtgaggcaggagaatcatttgaacccggcagttcaagttgttaatgacttctgttgaccattatttcttttgtacattgatcacagttctggtatttactgtggaactaaaagcatagggtcaacaaaccagttagtgtgtgcccaggattggtgacagactggccctaatctgaagattcaggggttccagtggcactggtgattcttgggatacctgtttagatttgagtgtttactgaaaagccttccccccaactacaccccagggagtcatgcgacactgcgtgaatcagcaaacaacaaaaataaaatgcaccaaaagaagaaacccactggggttttaatgtagaaagtgtaagattacagagaaaacaaagcatttatttaacaaacattattatcactattttttgagacagagtctcgtgctgtcgccaggctggagtgcagtgatgtgatctcggctcaccgcaacctccacctcccaggtcaagcgattctcctgcctcagcctcccaagtagctgggactacaggtgcacgccaccacacacagctaatttttgtatttttagtagagatggggtttcaccatgttggtcaggatggtcttgatctcttgaccttgtgatccacccacctcggcttcccaaagtgctaggattacaggcgtgagccaccatgcctggccaacaaacattattaaactggctctgacagaagaaaaatatgcatagatgacagagctcaaaatattaactacgtgcctacgaaagtatgcgtggtcaaatacttcctggaggccacaccacagggacactagggaccacaaaggtgaacccaagtccagctcagaggaggatagccctgcatacctggcgccccctgtagtgccctgcagcttgctgtcgtgccccgcagctcactgtcatgctcccgggtctccacccgagccctcctccactggcttcctggttcacactcacccttgcttcagggaagcacccccaccccgtcagatgcccatccagaccaggccaccgagccttgtagcacttagcctgtttgaatgtgagcacagaagggcaggaaagaagagtcatggagacctcagcacagcctgcatctcacacaggggaccaggcggaggcactcccaagtttactgcatgaaagaatcatgaccttggctggacgcggtggctcatgactgtaatcccagcacttggggaggctgaggtcaggagtttgagaccagcctggccaacatggtgaaaccccgtctctactaaaaatataaaaattagccagctgtggtggtgggtgctgggtctgtaatcccagctactcgagaggctgaggcaggagaatcgcttgaacccaggaggcagaggttgcagtgagccgagttcacagcggtgcactccagcctgggcaacagagtgagactctgcctcaaaaaaacaaaaaacatgacctcataggtctcaaagatgacctctctgtcccaccctgtgcaggctgtagtgaagctacacagaatccatcagcttcttactccaagaaccagagactgaaccctaaaatcacagctctcaagcgctgataaaatgatgtggacaagcatcagctgacaggaactatgaaggacaaggggaatgaccgaatgtataagccacacatggcccctgacttacaattttgtgactttatgatggtttgaaagacacacgcatttaataggaaaaccatgctccaagtacccatacaactattctgtgttttcattttcaggagtgtccaataatttacatgagatgttcaactttttcttataagatatgtattatgttagatggttctgcccaaccagaggccactctaagtgtctgtgcatgttcaggttggggggtgaggtgtgtccagtgcggctggagagcaggatgggtggtgcaatgcccagggtgcaagcatactccatgaggcccagtctgtgaacagagaccaggtctaaccccttcttccaggaaagcctcgtagggccttctggccaagaggccacgagtggtgaagactgcagactctgaaatcagaaatacctgggctccactgtcagcatggcagctgaggaagagtgaaaattcctctaagttcttttagaagtcccagcctccccatgtaactggggaactgatgggaggagcagagctgtctgtgcacataagaagttctcagtaaatggagacagttactatttctgttattattgaatttgaacaaattccctgggtatgtgtggggggacacttcaggtgaaaacacgcccctcctcccctggtgcgggggcctgtgctgccaccctctggaagcctgcagaggggcagggaaaacagaccctgaacaaaagtgtgcacccagtgaggaggtgcaagggcacaaaggtggcaccaagtgcctcaaggagaggctgaaacgcggcctggggacctcgcagtggtctggtcatataggcagtgggtgtgaagggctgtcctgtgtctcatagggaccactggctatagggacaaggctgttaaagtccaggagagagggggtggcttgaagagaggcacggcagagagtggaagcgtaggagaaagatgggctcctgggcatgtggtgtcagcagaggtgcctcaaggatagagtgagtccagagtctagaaaggagcagatcaccaggctctgggaagagcacagcatgggtgcacacactgctctacccagcatggctgccgacccaaagacagcaaagccaagaaggacacacaagcgtggccagatgcagccctgtgaggaaacttacccaagaacgggacgatgggcttgagaaaccatccatctacaaggatggcgtttgctgcagcaatgtttataataaattgtgggaaactgtgaactgcctaaatgtctcacaataggaacaaattagtgcaccacaccatgaaactctctacagctcctgagttacagaacgacagtataatactatagttatataatactgtataatactactgcataactattgtataatactgtatttctggatggaattatagggtctcccaacataaaagatgatgattcaaagttcctttccaaaattcctttttttttttgagatggagtctcgctctgccacccaggctggagtgcagtggtgcggcctctgctcactgcaacctccgccaccccggttcagcacttctcctgcttcagcctcccaagtagctgggactacaggcacctgccaccacatccagctaatttttgtatttttagtagagatggggttttgccatgttggcaggctggtcttgcactcctaacatcaggtgatccacctgcctcagcctcccaaagtgctgggattataggcatgagccaccgcgcccagccccctttccaaaatttctacaatgaacacactttgaaaggtttagttctcctacctgcaccctggagaacatccctgttgggagcaggggcaaggagaccccacccaagggaggcgcacaggacacactgaaaggcaggcgggcaaatgccaagaagtcagccatgaccacgcccagtccctcactagtcctcctccgacaggtggtttcaggagcacctgtgccgccccaggatcggctccaaggagcaaaaacaagaccgtgctggcgagggacaggctcagcctagacctggagggaaaggtgcccagccctgcaccgaggcatgcacttggagagcagaggtgttttcttcaagttcagtaagaaggaaaatgaaagagatgaggaagtaacttgaagatgtgaaagtgaggctcagagggttgcacagaggagtgcccgggcaccatgagtgcctccatgatggtgtgaggctgtgaggcccaccagtgcagccaagatactggggctggtaacagtgagcctcaagcagacatcccagtcaccagctgccctgttgtggctcctgaagcagggtttacggggagacaacatatatccccttctgtgtccaagcttgtgaggcctgtcagaaaaaaatccgctattttcatgaatatagaaaatgttctgcttctcactatatgaagacaccgtgcctaaaaatgccaagttttggccaccacagtgggctctgtcactgacagctgtgcacgctgtatcatgaaggccttaggctggacttctgatcaatgcttatgtatctgtagccatcttgatcagaatgatccaggcaagggccgccgtgtctccactgcccgagaggtatgcaaagaacaaagctctaagagcaagcgttgagtctccctgcattggcccttagggatctgctttgataaaaatctgagactggatcagagggctggaaataagctttttttggagacggagtttcgctcttgttgcccaggctggagtgtagtggagcgatctcagctcactgcaaccttgcctgctgggttcaagtgattctcctgcctcaggatc

SEQ ID NO: 108 - DNA, 1831 bp, human
gccgcgccgcccgcacgtggcagccccaggccccggccccccacccacgtctgcgttgctgccccgcctgggccaggcccaaaggcaaggacaaagcagctgtcagggaacctccgccggagtcgaatttacgtgcagctgccggcaaccacaggttccaagatggtttgcgggggcttcgcgtgttccaagaactgcctgtgcgccctcaacctgctttacaccttggttagtctgctgctaattggaattgctgcgtggggcattggcttcgggctgatttccagtctccgagtggtcggcgtggtcattgcagtgggcatcttcttgttcctgattgctttagtgggtctgattggagctgtaaaacatcatcaggtgttgctatttttttatatgattattctgttacttgtatttattgttcagttttctgtatcttgcgcttgtttagccctgaaccaggagcaacagggtcagcttctggaggttggttggaacaatacggcaagtgctcgaaatgacatccagagaaatctaaactgctgtgggttccgaagtgttaacccaaatgacacctgtctggctagctgtgttaaaagtgaccactcgtgctcgccatgtgctccaatcataggagaatatgctggagaggttttgagatttgttggtggcattggcctgttcttcagttttacagagatcctgggtgtttggctgacctacagatacaggaaccagaaagacccccgcgcgaatcctagtgcattcctttgatgagaaaacaaggaagatttcctttcgtattatgatcttgttcactttctgtaattttctgttaagctccatttgccagtttaaggaaggaaacactatctggaaaagtaccttattgatagtggaattatatatttttactctatgtttctctacatgtttttttctttccgttgctgaaaaatatttgaaacttgtggtctctgaagctcggtggcacctggaatttactgtattcattgtcgggcactgtccactgtggcctttcttagcatttttacctgcagaaaaactttgtatggtaccactgtgttggttatatggtgaatctgaacgtacatctcactggtataattatatgtagcactgtgctgtgtagatagttcctactggaaaaagagtggaaatttattaaaatcagaaagtatgagatcctgttatgttaagggaaatccaaattcccaattttttttggtctttttaggaaagatgtgttgtggtaaaaagtgttagtataaaaatggataatttacttgtgtcttttatgattacaccaatgtattctagaaatagttatgtcttaggaaattgtggtttaatttttgacttttacaggtaagtgcaaaggagaagtggtttcatgaaatgttctaatgtataataacatttaccttcagcctccatcagaatggaacgagttttgagtaatcaggaagtatatctatatgatcttgatattgttttataataatttgaagtctaaaagactgcatttttaaacaagttagtattaatgcgttggcccacgtagcaaaaagatatttgattatcttaaaaattgttaaataccgttttcatgaaagttctcagtattgtaacagcaacttgtcaaacctaagcatatttgaatatgatctcccataatttgaaattgaaatcgtattgtgtggctctgtatattctgttaaaaaattaaaggacagaaacctttctttgtgtatgcatgtttgaattaaaagaaagtaatggaagaattgatcgatgaaaaaaaaaa

SEQ ID NO: 109 - DNA, 6839 bp, human
gccccggcccctcctgcccatggcggtggccgagctgtacacgcagtacaacagggtctggattcccgatcctgaagaagtttggaagtctgctgaaatagccaaggactacagagttggtgacaaggtcctgcgactcctgctggaggatggaacggagctggattattctgtcaatccagaatctctgcctccacttcggaatcctgacatcctcgtgggcgagaatgacctcacggctctcagctatcttcacgagcccgcggtgctccacaacctcagaatccgctttgcagaatccaaactcatttacacctacagtggaatcattttggtggccatgaatccttacaagcagttgccaatatacggagatgccatcatccacgcctacagcgggcagaacatgggcgatatggacccacacatatttgccgtggcagaagaggcatacaagcagatggccagaaacaacagaaaccagtccataattgtaagtggggagtcaggtgctggaaagacagtgtcggctcgctatgccatgaggtactttgccaccgtcagcaaatcgggcagcaacgctcacgtggaagacaaggtcctggcatccaatcccatcaccgaggccgttggaaatgccaagaccacccgcaatgacaatagtagtcggtttgggaaatacacagaaatcagttttgatgaacaaaatcaaattataggagccaacatgagcacttacctcctggagaaatccagagttgtctttcaatcggaaaatgaacgaaattaccacattttctatcagctttgtgcatctgcacagcagtcggaatttaaacatcttaaattggggagtgccgaagaatttaattatacaagaatgggaggcaatactgtcattgagggtgtgaatgatcgagctgaaatggtagagactcaaaagaccttcacgcttctgggtttcaaggaggattttcagatggacgtttttaaaatcctggcagccatcctacatctgggcaacgtgcagatcaccgcggtgggcaacgagaggtcctcagttagtgaggatgacagtcacctgaaggtgttctgtgagctcctgggcctggagagtggcagagttgctcagtggctgtgcaatcgcaaaatcgtcacaagctctgagacggtggtaaaacccatgaccaggcctcaggctgtcaacgccagggatgcactggccaaaaagatctatgctcacctgttcgacttcattgtggagagaattaaccaagcgttgcagttttcaggcaagcagcacacttttattggtgttttggacatttatggttttgaaacctttgatgtgaacagctttgaacaattttgcatcaattacgctaatgaaaaactgcaacaacagtttaacatgcatgtcttcaaactggaacaagaagaatacatgaaggaagatataccttggacgctgatagatttttatgacaatcaaccagttattgacctgattgaagcaaaaatgggaattctggagttactggatgaagaatgtttgttaccacatggaactgatgaaaactggcctcaaaagctgtataataattttgtcaacaggaaccctttgtttgaaaagcctagaatgtcaaacacatcctttgtcatccagcactttgctgataaggtagagtataaatgtgaaggtttcctggagaaaaacagagacaccgtctatgacatgctggttgaaatcctgagagcaagcaagtttcatctctgtgccaacttttttcaagaaaatccaactcctccttctccttttggttcaatgattacagttaaatctgcaaagcaagtcatcaagccaaacagcaagcatttccgaaccacagttgggagcaagttccgcagctctctgtacttgctcatggagaccctcaatgcgacgacgccccactacgttcgatgcatcaagccaaatgatgagaagttaccctttgaatttgactccaaaagaattgttcagcagctgcgagcctgcggcgttttagaaacgattcgcattagtgcacagagctacccttccaggtggacatacatcgagttctacagtcgctacggcattctcatgaccaagcaagagctttccttcagcgataaaaaggaggtgtgcaaggtggttttacacagactcatccaggattctaatcagtaccagtttggtaaaaccaaaattttcttcagagcaggacaagtggcttatttagagaaacttcgattggataaactgaggcagagttgtgttatggtacaaaagcacatgcgtggctggctccagaggaaaaaattcctccgagagagacgagccgccctgataatccagcagtacttccggggtcagcaaactgtgaggaaagctattactgcagtggccttaaaagaagcttgggcagccataatcattcagaagcactgccgtgggtatcttgttcgcagcctgtatcagttgattcgcatggccaccatcacaatgcaggcctacagccgaggattcctggcaaggaggaggtatcgaaagatgctggaggaacataaggctgtgatcctacagaaatacgcacgggcgtggctggccagacgcagattccagagtatccgacgattcgtgcttaatattcagcttacttacagggtccagcgtttgcagaaaaagctggaagatcagaacaaagaaaaccatgggctggtggagaagctgactagcctggctgctcttcgagctggggatgtggaaaagattcagaagctggaagcagaactagaaaaagcagccactcacaggcgaaattacgaggagaaggggaagagatacagggatgctgtggaagagaaattggcaaagcttcagaagcataattcagaactggaaacacagaaagaacaaatacagctgaagcttcaagagaagactgaagagttaaaagaaaaaatggacaacctcaccaagcagctctttgatgatgtacaaaaggaagaacggcaaagaatgcttcttgaaaaaagttttgaactgaaaacacaagactatgagaagcagattcagtctttgaaagaagaaattaaagctctcaaggatgagaagatgcaactccaacacctggtggagggggagcacgtcacttctgatggcttgaaggcggaagtggcccgcctgagcaagcaggtcaagacaatctctgagttcgaaaaagagatagaactacttcaggcacagaagatagatgtggagaaacatgtgcagtcacaaaaacgggaaatgagagaaaagatgtcagagatcaccaaacaacttctcgaaagctatgacattgaagatgtaagaagcaggctctctgtggaagatctggaacatttaaatgaggatggagaactttggtttgcttatgaaggactaaagaaagcaacacgtgttttggagagccatttccagtctcagaaggattgctatgaaaaggagattgaagctttgaacttcaaagtggtgcatctcagtcaagaaatcaaccacctgcagaagttattcagagaagaaaatgacatcaatgaaagcatccgtcatgaagttaccaggctaacatcagagaacatgatgatcccagactttaaacagcaaatttcagaattggagaaacagaagcaagatcttgaaatccgcctgaatgaacaagctgagaaaatgaaaggaaaactagaagaattgtctaatcagttacatcgcagtcaagaggaggaaggaacacaaagaaaggccttggaagcccaaaatgaaatacataccaaagagaaggagaagctgattgataagattcaagaaatgcaggaggccagtgaccacttgaagaaacaatttgaaactgaaagtgaagtcaagtgtaacttccggcaggaagcatcccggctcactttggaaaacagggatcttgaagaagaattagacatgaaagacagagtgattaaaaagctacaagatcaagtcaagacactaagcaagacaattggaaaagccaatgatgtgcactcgtcctcaggacccaaggagtaccttggaatgctgcaatacaagagagaagacgaggccaagctcattcagaacctcattcttgacttgaagccccgtggcgtggtggtgaacatgatccccgggctgccggctcatatcctgttcatgtgtgtgcgctacgcagactctctgaatgatgccaacatgctgaagtccctcatgaacagcaccattaatggcatcaagcaggtggttaaggaacatttagaagactttgaaatgctgtccttttggctttccaacacttgtcattttctcaattgcctgaagcagtacagcggagaagaggaattcatgaagcataatagtccacagcagaataagaattgcttgaacaattttgacctttcagaatacagacagattctcagtgatgtggctatacgaatatatcatcaatttattatcataatggaaaagaatatccaaccgataatagttccgggaatgctggagtatgagagcctgcagggcatttccggcctgaagcccacaggcttccggaagcgctcctctagcatagacgacacggacggctacaccatgacctccgtcctgcaacagctgagctacttttacaccaccatgtgccagaacggcctggaccccgagcttgtgaggcaggcggtgaagcagctcttcttcttgatcggggcggtcacgctgaacagcctcttcctgcgcaaggacatgtgctcctgcagaaaagggatgcagatcaggtgcaatatcagctacttagaagaatggcttaaagataagaacttgcagaacagcttagcaaaggaaactttggagcccctctctcaggcagcctggttgcttcaggtcaagaagaccacagacagtgatgccaaggagatctacgaacgctgcacctcactgtctgctgtgcagatcataaagatccttaattcatacacacctatagatgactttgagaagagagtgactccatcctttgttcgcaaagtacaggctctcctaaatagccgggaggattcatcacagctgatgttggataccaaatatctctttcaagtcacatttccttttaccccctctccacatgctctggaaatgattcagatccccagcagtttcaagctaggctttctgaataggttatagcaggagaaaaagtcaatgcactttttcttcaaaagctaagtgaaggttcaatatgagggatgtgttttattaattggcagtggaaattgggaatgtgatttaaggaagaaaacagacttttgctcaaatggaccacatcatctctcactcacagtgacaatgctgctcctgtaattttgtaagaattcacacacaccagctgtatttggaaaagccatgtctcactctcgaatctcagctggttttcactgaaattcctggagggctcatattttcttccacgtgcctcttgatctgttctgtcttgtggcagggctctaccaggagggagtgagatctggggacacagtggcttccaagttttctaaggttcatgtgaaacctgagtacatttacaaagctgcaagtggattctagtgctgagtcttccaggaaaaaatcccgtttggccaccgtgacctgccaaaagttctcttgccccatgcctgctggggacagaaggttttcatgaactctttttactgaaaatgccctgcatttaaaaatgtttattttagacccttctaaatttttttttttttttgagactccggagtctcgctctatcgccaggctggagtgtagtggcatgatctcggcttattgcaacctccgcttcctgggttcaaacaattctcctgcctcagcctcctgagtagctgggactacaggcacctgccaccacgcccagctaatttttgtatttttagtggagacaggtttcaccatgttggccaggatggcctcgatctcttgacctcgtgatccgcccacctcagcctcccaaagtgctaggattacaggcgtgtgccaccgcgcctggctgacccttttaatttttaagagtgttcaatccgagatgaatcatttgaagtatttttatatgtatatctatttaaaactaatatattattaaagcttaattgccatgccgtttatcttctctgaaagaacttcaaatcttacctgccaacatattcaccataatttttttattttttaatacctttcatacaataacttttttaaaacaacctcagattgaaaaagcaacctaaattactttcgctctctaatcagcatttcaatgtatttatttttaaattttctcaaaaagtaactaaaaaattgtgtcggaccctacttttgagaaatttacgtttcccaagttttatgggaactggctattccttgtcccggcacaccttctcattccttcctttcagagcctaaaacctcatttgataagcactcctagtctctggcctgtggatccagtgctattctgtcaccaacctaagaatcccaattgcaccttctgtttctgacagtcacaggtgacagctgtgattctataatacagactggtgtcttagaggtaggaataatacatgattatgaagcatcaccctgctaatacataataatgtctttttatattataagtgattgagtttagttcatttcaatacattgtacatgaaaaaatgaaaagtagaactttgtaatactttaatcaataaaattaattaccaaaaaaaaaaaaaaaaaa

SEQ ID NO: 110 - DNA, 1070 bp, human
ggggtggcgcccggagctgcacggagagcgtgcccgtcagtgaccgaagaagagaccaagatgaatgcagagcccgagaggaagtttggcgtggtggtggttggtgttggccgagccggctccgtgcggatgagggacttgcggaatccacacccttcctcagcgttcctgaacctgattggcttcgtgtcgagaagggagctcgggagcattgatggagtccagcagatttctttggaggatgctctttccagccaagaggtggaggtcgcctatatctgcagtgagagctccagccatgaggactacatcaggcagttccttaatgctggcaagcacgtccttgtggaataccccatgacactgtcattggcggccgctcaggaactgtgggagctggctgagcagaaaggaaaagtcttgcacgaggagcatgttgaactcttgatggaggaattcgctttcctgaaaaaagaagtggtggggaaagacctgctgaaagggtcgctcctcttcacatctgacccgttggaagaagaccggtttggcttccctgcattcagcggcatctctcgactgacctggctggtctccctctttggggagctttctcttgtgtctgccactttggaagagcgaaaggaagatcagtatatgaaaatgacagtgtgtctggagacagagaagaaaagtccactgtcatggattgaagaaaaaggacctggtctaaaacgaaacagatatttaagcttccatttcaagtctgggtccttggagaatgtgccaaatgtaggagtgaataagaacatatttctgaaagatcaaaatatatttgtccagaaactcttgggccagttctctgagaaggaactggctgctgaaaagaaacgcatcctgcactgcctggggcttgcagaagaaatccagaaatattgctgttcaaggaagtaagaggaggaggtgatgtagcacttccaagatggcaccagcatttggttcttctcaagagttgaccattatctctattcttaaaattaaacatgttggggaaacaaaaaaaaaaaaaaaaa

SEQ ID NO: 111 - DNA, 2442 bp, human
gcgggattccgggccgggccggcctgggctgcaatcaatgcggctttgtctgggacgcccacatcccagaggccattcccgggtcggcaaatcggagcgcggcggggcgcgcgggggtgagataagcggccatgtgatcccacctgggctggaaggggaggggcgccaggtgaggcggcggccggtggggcgcgggcggccacgcggggctcctgcagcatggctgtcagcaggaaggactggtccgcgctgtccagccttgcccggcagaggactctggaggatgaggaggaacaggagcgcgagcgcaggcggcggcaccgcaacctgagctccaccacggacgatgaggctcccaggctcagccagaatggagaccggcaggcctctgcttctgagagactaccgagcgtggaagaagcagaggtgcccaagccactgcccccagcctccaaagatgaggacgaggacatccagagcatcctcagaacacggcaggagcggaggcagaggcggcaggtggtggaggctgcacaggcccccatccaggagaggctggaggcagaggaggggaggaacagcttgagccctgtgcaggccacacagaaacccctagtctccaagaaggaactggaaatcccacctcgccggagactgagtcgggaacagcggggcccctggcccctggaggaggagagcttggtgggcagggagccagaagagaggaagaaaggggttccagaaaagtccccagtcttggagaagtcctccatgccaaagaagacggcacctgaaaagagcctggtctccgataaaacctccatctctgagaaggtgctggcctcagagaagacatctctatcagagaagatagcagtgtcagagaaaagaaacagctcagagaagaagtctgttctagaaaaaaccagtgtctctgagaagtcgctggccccagggatggcactgggctcaggaaggaggctggtgtctgagaaagcttccatctttgagaaggcactggcctcagagaagagcccaactgcagatgctaagccggccccaaagagggccacagcctcagagcagcccctggcgcaggagccgccagcctctgggggaagcccagccaccaccaaggagcagagaggaagggccctccctgggaagaacctgccctctttggcaaagcagggggcttcagaccctccgactgtggcctcccgcctcccacccgtcacactccaggtgaaaatccccagcaaggaggaagaggcagatatgtcctcacccacacagcgaacctacagcagctccctcaaacgctccagccccaggaccatctcctttcggatgaaacccaagaaagaaaactcggaaacaaccctaactcgcagtgccagcatgaagctcccagacaacacagtgaagttgggagagaagctggagagataccacacggccatacggagatcagaatctgtcaagtctcggggtctgccttgcactgagttattcgtggctcctgtgggtgtagccagcaagcgccacctctttgagaaggaactggcgggccagagccgagcagaaccagcctccagccggaaggagaacttgaggctctcaggggttgtgacatcaaggctcaacctgtggatcagcaggacccaggaatctggagatcaggacccccaggaggcacagaaagcatcatctgcaaccgagaggactcagtggggacagaaatctgactcctcgctggacgctgaggtgtgacaagccccgccaagacagacctgcaagtcttcgtctcaagggacctccctcatgccaggcccctgcctctcacagcagcaccctttcctctcattgtccctgttcccttgttggctgtggatctgtttggccagggtccctggggtcaggaatatttgcaagactcagccagctccttcccagcccagcctcttggggctgggactttctcaccctgcggcaggcacaacagatgctgggacccagtctctgcccaggtcacagcacaagtgcacatcagcactatggggcctatgtcctgcccagagacctctgctccttcctgctcacatccacagtcagggcacggcgcccctcaagaactccagagtcacctgtctcatcggctcccaacaagtgcctctttgtctatgatgtcccccttctctgaggcctggacccacccatctttgtccctgggggctgctcccagccactgaggcccgctctggccaggggagaaggagctgccgtgcgtcttccctgtgccccgtctccctgcttggttctcccctcccttccctggccggctgccatggccaggagctaagtgcctttttgtgtgcaaccacttaccctttctctgaaaaacctgttctcaggaaggatctgataaactcatttactctc

SEQ ID NO: 112 - DNA, 3569 bp, human
  misc_feature (3283)..(3283): n is a, c, g, or t
aatttacatccattcatgaatctgtgacgtcagcaagcctttgggctcctttgcggtgggctggaggattgtgtgggtggaatccccctcccctttatttttccaattctgcaaggcttttaaaattcaccttacatcttttcaaagcaagaaaatggaacagcatgtgtaggaattcttcgttgttgttttggagccctctcttaagtcagaactctgtcccaaaaatcttctgagtgtcatctcaggactttggttatactcatggcacgatggccaactttcaggagcacctgagctgctcctcttctccacacttacccttcagtgaaagcaaaaccttcaatggactacaagatgagctcacagctatggggaaccacccttctcccaagctgctcgaggaccagcaggaaaaggggatggtacgaacagagctaatcgagagcgtgcacagccccgtcaccacaacagtgttgacgagcgtaagtgaggattccagggaccagtttgagaacagcgttcttcagctaagggaacacgatgaatcagagacggcggtgtctcaggggaacagcaacacggtggacggagagagcacaagcggaactgaagacataaagattcagttcagcaggtcaggcagtggcagtggtgggtttcttgaaggactatttggatgcttaaggcctgtatggaatatcattgggaaggcatattccactgattacaaattgcagcagcaagatacttgggaagtgccatttgaggagatctcagagctgcagtggctgggtagtggagcccaaggagcggtcttcttgggcaagttccgggcggaagaggtggccatcaagaaagtgagagaacagaatgagacggatatcaagcatttgaggaagttgaagcaccctaacatcatcgcattcaagggtgtttgtactcaggccccatgttattgtattatcatggaatactgtgcccatggacaactctacgaggtcttacgagctggcaggaagatcacacctcgattgctagtagactggtccacaggaattgcaagtggaatgaattatttgcacctccataaaattattcatcgtgatctcaaatcacctaatgttttagtgacccacacagatgcggtaaaaatttcagattttggtacatctaaggaactcagtgacaaaagtaccaagatgtcatttgctggcacggtcgcatggatggcgccagaggtgatacggaatgaacctgtctctgaaaaagttgatatatggtcttttggagtggtgctttgggagctgctgacaggagagatcccttacaaagatgtagattcttcagccattatctggggtgttggaagcaacagcctccaccttccagttccttccacttgccctgatggattcaaaatccttatgaaacagacgtggcagagtaaacctcgaaaccgaccttcttttcggcagacactcatgcatttagacattgcctctgcagatgtacttgccaccccacaagaaacttacttcaagtctcaggctgaatggagagaagaagtgaaaaaacattttgagaagatcaaaagtgaaggaacttgtatacaccggttagatgaagaactgattcgaaggcgcagagaagagctcaggcatgcgctggatattcgtgaacactatgagcggaagcttgagcgggcgaataatttatacatggaattgagtgccatcatgctgcagctagaaatgcgggagaaggagctcattaagcgtgagcaagcagtggaaaagaagtatcctgggacctacaaacgacaccctgttcgtcctatcatccatcccaatgccatggagaaactcatgaaaaggaaaggagtgcctcacaaatctgggatgcagaccaaacggccagacttgttgagatcagaagggatccccaccacagaagtggctcccactgcatcccctttgtccggaagtcccaaaatgtccacttctagcagcaagagccgatatcgaagcaaaccacgccaccgccgagggaatagcagaggcagccatagtgactttgccgcaatcttgaaaaaccagccagcccaggaaaattcaccccatcccacttacctgcaccaagctcaatcccaatacccttctcttcatcaccataattctctgcagcagcaataccagcagccccctcctgccatgtcccagagtcaccatcccagactcaatatgcacggacaggacatagcaacctgcgccaacaacctgaggtatttcggcccagcagcagccctgcggagcccactcagcaaccatgctcagagacagctgcccggctcgagccctgacctcatctccacagccatggctgcagactgctggagaagttctgagcctgacaagggccaagctggtccctggggctgttgccaggctgacgcttatgacccctgccttcagtgcaggccagaacagtatgggtccttagacataccctctgctgagccagtggggaggagccctgacctttccaagtcaccagcacataatcctctcttggaaaacgcccagagttctgagaaaacggaagaaaatgaattcagcggctgtaggtctgagtcatccctcggcacctctcatctcggcacccctccagcgctacctcgaaaaacaaggcctctgcagaagagtggagatgactcctcagaagaggaagaaggggaagtagatagtgaagttgaatttccacgaagacagaggccccatcgctgtatcagcagctgccagtcatattcaacctttagctctgagaatttctctgtgtctgatggagaagagggaaataccagtgaccactcaaacagtcctgatgagttagctgataaacttgaagaccgcttggcagagaagctagacgacctgctgtcccagacgccagagattcccattgacatatcctcacactcggatgggctctctgacaaggagtgtgccgtgcgccgtgtgaagactcagatgtctctgggcaagctgtgtgtggaggaacgtggctatgagaaccccatgcagtttgaagaatcggactgtgactcttcagatggggagtgttctgatgccacagttaggaccaataaacactacagctctgctacctggtaatgaaggaatacacatcctgaagatctcgtgactatactggcatttcagatccaccccacccccagactcatcccactctctcccagcattttgtctgggaagagagactnacccatctttacccaccccctagaaatgagctgcaataacaggaacatgagacttcgcaaatctctggaaaataatatccaaatgaaattaagtctcactgaacatttcaatcaagaatggcagggatctattttattgaatattctagctactgtaacattgatatttatttttgtttgacattttaacactttgtactgcaaagagtgaactatatatgagatagagagacaataatttcttgcaaaaaaaaaaagagataaaagaaagaacaaaaaaaaaaaa

SEQ ID NO: 113 - DNA, 737 bp, human
ggagtttcgccgccgcagtcttcgccaccatgccgccctacaccgtggtctatttcccagttcgaggccgctgcgcggccctgcgcatgctgctggcagatcagggccagagctggaaggaggaggtggtgaccgtggagacgtggcaggagggctcactcaaagcctcctgcctatacgggcagctccccaagttccaggacggagacctcaccctgtaccagtccaataccatcctgcgtcacctgggccgcacccttgggctctatgggaaggaccagcaggaggcagccctggtggacatggtgaatgacggcgtggaggacctccgctgcaaatacatctccctcatctacaccaactatgaggcgggcaaggatgactatgtgaaggcactgcccgggcaactgaagccttttgagaccctgctgtcccagaaccagggaggcaagaccttcattgtgggagaccagatctccttcgctgactacaacctgctggacttgctgctgatccatgaggtcctagcccctggctgcctggatgcgttccccctgctctcagcatatgtggggcgcctcagcgcccggcccaagctcaaggccttcctggcctcccctgagtacgtgaacctccccatcaatggcaacgggaaacagtgagggttggggggactctgagcgggaggcagagtttgccttcctttctccaggaccaataaaatttctaagagagct

SEQ ID NO: 114 - DNA, 1894 bp, human
ggctgaggacccgagggaggacacggttaaagcatcgctatcaactgcgtaacccagagagccctccttagccaacacgctaactccgaagcctccccttacgcccccgaaccaccgaaggcggcgacacctgattcagcgcacaaacacaggtcccttctgtcccggatacaattacgcggcagacacacactcagactcgcgcggggcagccaagagacgagctatgaagtcttacactccatatttcattctcctgtggagtgctgttgggatagcgaaggctgctaaaatcatcatcgtgccgccaattatgtttgaaagccatatgtacattttcaagacgctagcctcagccttgcacgagagaggccaccatacagtgttcctcctctctgaaggcagagacatcgccccatctaatcattacagcctccagcgctacccaggaatctttaacagtaccacctcagatgctttcctacagtccaagatgcggaatattttctctgggagattgccagcaatcgaactgtttgacatactggatcactatactaagaactgtgacatgatggttggcaaccatgccctgatccagggtctgaagaaagaaaaatttgacctgctgctggtggaccctaatgatatgtgtggatttgtgatagctcatcttttaggggttaaatatgctgtattttcaactggcctttggtatcctgctgaagtgggtgctcctgctccattagcatacgtcccagagtttaactcactcctcacagaccgcatgaacttgctgcaaaggatgaaaaataccggtgtttacctcatttccagattaggggtcagctttctggttcttcccaaatatgaaaggataatgcagaagtacaacctgctgccggagaagtccatgtatgatttggttcatgggtccagcctgtggatgctgtgtactgacgtagcactggaattcccaagacccactctgcctaatgttgtttatgtaggaggaatcctaaccaaaccagccagcccactaccagaagatctccaaagatgggtaaatggtgctaatgaacatggctttgtcttggtgtcttttggagctggtgtcaagtatctgtcagaagacattgctaacaaactggcaggagctctggggagattgcctcaaaaagtgatttggaggttttctggacccaaaccaaagaatctaggaaacaacactaaactcatagaatggttaccacaaaatgacctgcttgggcattcaaagattaaagccttcgtgagccatggtggtttgaacagtatttttgaaactatgtatcatggtgtgcctgtagtgggaattccagtctttggagaccattatgatactatgaccagagtacaggcaaaaggcatggggatattgctagaatggaagacagttactgaaaaagagctctatgaagcactagtgaaggttatcaataatcccagctaccgtcagagggctcagaagctttcggaaattcacaaggatcaacctggtcaccctgtcaatcgaactatctattggatagattatattattcgtcacaatggagcccatcacctacgtgccgctgtccatcagatctccttttgtcagtattttttactggatattgcctttgtgcttttgcttggtgctgccttgttatactttctcttgtcttgggtgacaaaatttatctacagaaaaatcaaaagtctgtggtctagaaataagcatagcacagttaatggacattaccacaatggaatcctcaatggcaagtacaaaagaaatggccatattaaacatgaaaagaaagtgaaatgagccgacagcccaggtgatagaaataaattggttcactcattg

SEQ ID NO: 115 - DNA, 777 bp, human
  misc_feature (2)..(2): n is a, c, g, or t
  misc_feature (6)..(6): n is a, c, g, or t
  misc_feature (13)..(13): n is a, c, g, or t
  misc_feature (627)..(627): n is a, c, g, or t
  misc_feature (751)..(751): n is a, c, g, or t
  misc_feature (760)..(760): n is a, c, g, or t
  misc_feature (774)..(774): n is a, c, g, or t
gntganttcgaangccccaaacctgctttataaggctgcgtggccccactggcttctctgctgagatatgaggtgccagccaggcagacaggtgacagagggtgacccttcctcaccttctccccatcactaccatccctccggccctacaaatacccatctctataatgcaaccacttcaaaaaatactctgaggagggacagggtgaaaggggtagggggtcagactggtctgaacagcaggctggttcccgtgaggtagctgatgcccatgctcctgggcagaggcttttggagagaggccagttatgggctcacagccaggagggagtcactgattgactggaaagtggaggaagcagaaagtcttgaagtctgcccagagcacttgatcacaggtaacgtctgggtagaaaggctgggctctttgctggtgtcctcactgtcctttgaggaactgggtttctggggataaggggaaaggccagcttgagtcttcttggatttgggcgtggtcccgtcttcagagagtagtaggctaacctcacaggagctttgttttcccagcttgctagtctctgatttgctgaaggcattgagtatcacgtcatcctttgagatagtcanaaagtgatgtccgggagagacccacactggagcagaatcagaagacaactcccatgtgggaaacccttttgtagcaccaacttccgggagcagatctactcctttaagcttgttggccatgggnattttctgnttcccatttgggtnggg

SEQ ID NO: 116 - DNA, 525 bp, human
  misc_feature (471)..(471): n is a, c, g, or t
  misc_feature (496)..(496): n is a, c, g, or t
  misc_feature (522)..(522): n is a, c, g, or t
ttttttcagaatccaaaaggactttattttctggcactgggaggcgccctgaggccacagccttttcccagggctgctggcagggtcccagggctgctggcaggggttgtggtcctgttgagcagaggagcgacgccgctgccctggcccccgctgtccctatgatcctgcactctggggtgggagctacatatcatccttggacaccaggcagtagaagtctgtgcgggcactgtagtttcgcgagccgagatccgagacgtccacttcgctgctccggctctctcccagcgagaccccactggtgtgcggtggagctgatggctctccaaagacaggcccccggacacccaggtcgccctcagggtccgggtccacctctgagtccagggcccggcctcagggactcggcctcgaagaatcagcatggggtccttgtcgtcctgcagtggtctgggggtctccttccanaggcctgtactgaacttccgggcanccagtaactttctttccaaaatcgangaa

SEQ ID NO: 117 - DNA, 4860 bp, human
gcactgggagacgtgcggttccgggtcgctgctcggctcgccggctgggcggtgggggttggtgacgcgggccggcgctcacgagaggcccgggaggcggggctttgctggcttcccagagagaggcaggacagaatgctttgacctccaagctgttttaaatctagtagataagccagatcctgtgttgccataagcccttggcccacatttaagtgggaatgcagctagcttggatgtctgaaactttgtaggcgcctctgtctgaatcctgaacacaggcaccaggactactgagagctcgtcatctgtgcaggatagccacacagcaaacatgtttgcaaaactgaagaagaaaattgcagaagagactgctgttgctcagaggccaggaggtgctactaggatcccacggtctgtgagcaaggaatcagttgcctcaatgggagctgactcaggagatgactttgcttccgatggaagcagctccagagaagatctttcatcccagcttctgagaaggaatgaacagatacggaagttagaggccagactttctgactatgctgaacaggtccgaaacttgcagaagataaaagagaagcttgaaattgcattagaaaaacaccaggattcttccatgcggaaatttcaagagcagaatgagacattccaagccaacagagccaaaatggcagaaggactggctttggcattagccagaaaggaccaggaatggtcagaaaagatggatcagcttgaaaaggagaaaaatattctgacagcccagttacaggaaatgaagaaccagagtatgaatcttttccaaaggagagatgaaatggatgaattagaggggttccagcagcaggaactaagtaaaataaagcacatgcttttaaaaaaagaagaaagtctagggaaaatggaacaagaattggaggcacgaaccagagaacttagtcgtacccaggaggagttgatgaactccaatcagatgtcatcagacttaagccagaagctagaagaattgcagagacactactcaacgctggaagagcagagagatcatgtgatagcttcaaaaacaggtgcagaaagtaagatcacagccctggaacaaaaggaacaagagctccaagcactcattcagcagctttccattgatttgcaaaaggtcactgctgaaactcaagagaaagaagacgttatcacacatttgcaagagaaggttgcatccttggagaagagactagaacagaacttatcaggagaagaacacgtgcaagaactcctgaaagagaaaacacttgctgagcagaatttggaggataccagacaacagctcttggcagccagaagcagccaggctaaggccattaacaccctggagactcgggtgagagaactggagcagaccttgcaggcctctgaggagcagctccaacagagcaagggcattgtggctgcccaggaaactcagatacaggagctcgctgccgccaaccaggagagcagccatgtgcagcagcaggcccttgctctggagcagcagttcttggagcgcacccaggcgctagaagcccagatagtggccctggagagaacgcgggcagctgaccagaccaccgcagagcaagggatgagacaactggagcaagaaaatgcagcccttaaagaatgcaggaatgaatatgaacgttctttacaaaatcaccaatttgaactaaagaagctgaaggaagaatggagccaaagagaaattgtgagcgtggccatggctcaagccctggaggaggtgcggaagcaaagggaagagttccagcaacaggcagctaacctgacagccataatagacgagaaggaacagaatctgcgggaaaaaaccgaagtgcttctccagaaagagcaggagattctccagctggagcgaggtcacaactctgccctgctgcagatacaccagctgcaggccgagctggaggccctgaggaccctcaaggcggaggaggctgcagtggtcgcggagcaggaggacctgctgaggctgcggggcccattgcaggccgaagcactctcagtcaatgagtcgcacgtgacctcgagggccatgcaggaccctgtgttccagcttccaactgcaggaagaacaccaaatggtgaggttggggccatggatctcacacagctacagaaggagaaacaggacttggagcagcaacttctggagaaaaataagaccataaagcagatgcagcagcggatgctggagctccggaagactctgcagaaggagctgaaaatcagacccgataatgagctcttcgaagtccgggagaaacctggacctgagatggcaaacatggcgccttccgtcacgaataacactgacctgacagatgcccgcgagatcaactttgagtaccttaaacatgtggttttaaaattcatgtcttgtcgcgaatccgaggcttttcatcttataaaagctgtgtcagtgttgctgaacttttcccaagaggaggagaacatgctcaaggaaactctggaatataagatgtcatggtttgggtccaaaccagctcccaagggcagcatccggccgtctatctcaaaccctcggataccatggtcctagaggggactacccaaggatggagctccgtgggttgacactttttctgtgaaaagaacactgacacaccagtctgggtgggtttttaatcactgtaactgcagtattttgtacaagtgtctaaacattgtttacaagactaaggcccacttccctgcaggctgacctgaacctcagggggtagctgatcctgtcattctggtcaccaaacaggagggtcctggcactacccagatttccacagtgctgctaatatcccagctccagccagcaccccatctgcacctgaatcctctaacttcacggtagcacttacagctgaagccatcagcatctggcaggcacacctgagtcaccatgtagcgctgctactggaggtagagacggccctttgagatggtgcccagcaggccaaacccacctgcctctgccaggaacagccaactccatgggaactctatgggagtggcttttaaaaattcagatgagttagaagctttttatcccttcctctcaagaaaatattctttcaccctgtctctcaaaccacctagaactttagaggatccatctttaagggccggtgtggatgaatgagaaaatgcacctttctgacagtatctccactttacttaagaaaactagcaaatatatgaaaagacccttagtaccaaatacactcaattgcctttttaatgaatgtacttgtcttggataggttgctggtaaaccattttaaactattttttatagctgaagttcttcactactataaacgtcttctgtactataaaatccatttaactggtgttcttaaaatcagagcgtccagaggaaattcttcctaaaactaggattcctgttcctttgtcttctcactcgcactctggcactgctccctctgaagtgcagtgggatctcgtgtgctttgtcttgattctgtgctgcgctgccgctgggcgatgcagaccacctgtcttctactgaaggacagtccgctgtctccagtgggggcagcagctgtcccccagcctcgatggagacattggggcagtctgccttgtctgtggagctgctctctctccctcatcccaccccaaatacttaaaatgacactacacccagacggcgcccagctggctgcagcacttgtagcatgcacatgactctggtagtaaccaacaaaaacttgttttatggattcctcgtttactgaggaaagggaacatgctggttctggaaaagccacaatattgaatctaaaaggaaaccgtttattgtttgatgaaagtttcactggttaaataaaaaactaaattaataactggagcctctaaatttattatccattatccagtgatggaaagttgtatttctcaatcatgcttagggccaaaataggtatataaaatgtgtcacagaaaaacacgcatttgcaacgttaacctaacgaaatttccatgaagaaccaagtcagggcagcatctccttagtcccagctcaggctctctgccttccagaggccgcttctccagtgactaacctcctcctctggctcctccttgcagacagttatcccttgtttagaacacgaatttccatttacctggtgggaacacgaaacaggagtctcttctgttctgcaagtttgatgggtaagaggtagccttttttcaaagtaggatttcctttttcaactgttccaggaaagaatctctaagactgggtagctcacagccagccaaaggcagctacatttccacagaagcccgtccgctgcctccgtggcttctccagccattgaactggtcccacacgcaccccaggccccactcctcggcagtttcaggtgtagctgtggggcccgttcctaggtctgtactcactttagggaggcttcactgactaggctttcctcctgcatgttgaatttccttcagctttaagaggaagagtggaataaatattctaagtgatttaatgcactttgacttgtataaaactttctgtgttagcgacggtatctatagccctttatacgagcgatggatcttgagctctccttccatgttgtaaatagggattgtattcttgaaaactgctgtagcaaattcatctgtggtgcaatacactttttgattaaagctcttcaatccagatgcaaaaaaaaaaaaaaaaaaaaaaaaaaaaaaaaaaaaaaaaaaaaaaaaaaaaaaaaaaaaaaa

SEQ ID NO: 118 - DNA, 5792 bp, human
aaagttcatccccccagaatgaaaatgaggacatttgagaaggtgatttaaggtgtggacatttgagaaggtgtcctatcaaattagtaaaccaaaggaaaagtactgaatagattaatccaaaacacttactgttttttaaacgaagaggatttcaccttgacagaaaaacaacttttattcaatatgtatttcctgaaattaaagagacaagtacagactgaaaggaaaatagattcgtaaataagctacgtcaactctatcctgctgaggatagctcagtgatgttaaatcctttacaaatccctggttgtcttcctacagacaagactgctttttgatgggactgatattaagagaaataggacctttggggcattcaactccttgataaaacttaaaagtatcggcatgagtggcttaacagaggaaataaagaagttttcaactaaatccaaaagtgcggtcattttctttactgctgttattttaaaaacctcttcataaccattgaaaaagaatcgacaactattttaaaagattaaagaaaggcagatgtctgcaaataattcccctccatcagcccagaagtctgtattacccacagctattcctgctgtgcttccagctgcttctccgtgttcaagtcctaagacgggactctctgcccgactctctaatggaagcttcagtgcaccatcactcaccaactccagaggctcagtgcatacagtttcatttctactgcaaattggcctcacacgggagagtgttaccattgaagcccaggaactgtctttatctgctgtcaaggatcttgtgtgctccatagtttatcaaaagtttccagagtgtggattctttggcatgtatgacaaaattcttctctttcgccatgacatgaactcagaaaacattttgcagctgattacctcagcagatgaaatacatgaaggagacctagtggaagtggttctttcagctttagccacagtagaagacttccagattcgtccacatactctctatgtacattcttacaaagctcctactttctgtgattactgtggtgagatgctgtggggattggtacgtcaaggactgaaatgtgaaggctgtggattaaattaccataaacgatgtgccttcaagattccaaataactgtagtggagtaagaaagagacgtctgtcaaatgtatctttaccaggacccggcctctcagttccaagacccctacagcctgaatatgtagcccttcccagtgaagagtcacatgtccaccaggaaccaagtaagagaattccttcttggagtggtcgcccaatctggatggaaaagatggtaatgtgcagagtgaaagttccacacacatttgctgttcactcttacacccgtcccacgatatgtcagtactgcaagcggttactgaaaggcctctttcgccaaggaatgcagtgtaaagattgcaaattcaactgccataaacgctgtgcatcaaaagtaccaagagactgccttggagaggttactttcaatggagaaccttccagtctgggaacagatacagatataccaatggatattgacaataatgacataaatagtgatagtagtcggggtttggatgacacagaagagccatcacccccagaagataagatgttcttcttggatccatctgatctcgatgtggaaagagatgaagaagccgttaaaacaatcagtccatcaacaagcaataatattccgctaatgagggttgtacaatccatcaagcacacaaagaggaagagcagcacaatggtgaaggaagggtggatggtccattacaccagcagggataacctgagaaagaggcattattggagacttgacagcaaatgtctaacattatttcagaatgaatctggatcaaagtattataaggaaattccactttcagaaattctccgcatatcttcaccacgagatttcacaaacatttcacaaggcagcaatccacactgttttgaaatcattactgatactatggtatacttcgttggtgagaacaatggggacagctctcataatcctgttcttgctgccactggagttggacttgatgtagcacagagctgggaaaaagcaattcgccaagccctcatgcctgttactcctcaagcaagtgtttgcacttctccagggcaagggaaagatcacaaagatttgtctacaagtatctctgtatctaattgtcagattcaggagaatgtggatatcagtactgtttaccagatctttgcagatgaggtgcttggttcaggccagtttggcatcgtttatggaggaaaacatagaaagactgggagggatgtggctattaaagtaattgataagatgagattccccacaaaacaagaaagtcaactccgtaatgaagtggctattttacagaatttgcaccatcctgggattgtaaacctggaatgtatgtttgaaaccccagaacgagtctttgtagtaatggaaaagctgcatggagatatgttggaaatgattctatccagtgagaaaagtcggcttccagaacgaattactaaattcatggtcacacagatacttgttgctttgaggaatctgcattttaagaatattgtgcactgtgatttaaagccagaaaatgtgctgcttgcatcagcagagccatttcctcaggtgaagctgtgtgactttggatttgcacgcatcattggtgaaaagtcattcaggagatctgtggtaggaactccagcatacttagcccctgaagttctccggagcaaaggttacaaccgttccctagatatgtggtcagtgggagttatcatctatgtgagcctcagtggcacatttccttttaatgaggatgaagatataaatgaccaaatccaaaatgctgcatttatgtacccaccaaatccatggagagaaatttctggtgaagcaattgatctgataaacaatctgcttcaagtgaagatgagaaaacgttacagtgttgacaaatctcttagtcatccctggctacaggactatcagacttggcttgaccttagagaatttgaaactcgcattggagaacgttacattacacatgaaagtgatgatgctcgctgggaaatacatgcatacacacataaccttgtatacccaaagcacttcattatggctcctaatccagatgatatggaagaagatccttaatcactgagctaacctaaataaggaaggatttcattttatggactgatattttgctgtgtaacttgttcttcgtagattgtcatctgcagtgctgcaaagatatgaagaaatatgataacgaataagtgacaccagtactgtagttcataatgagtaggtacaggcgggaaactgaataataagaagtcataatggaatcaaggtgaagctttttataaacttttttagcctaagcaataactggttttgtattttttcttaatccttcactttaatacaataggctcacttaatttgtcttcccatttctctttatatatatatatatatataaaaaaatataaatatatgtttgtttgtttgtttttttaaggaaaaacaagtcaagctagcatccagttactatatagcttggctaaattatacaagacttacaagattgattactcgacaggcttgtatttaagagataactgtgaggttaccattatgtgatgttactataaggacttttaacattggtttaacaaaccatagaggcattgaagggtttttcttagatgcctagaaaaagcacactgggctgttttacctttcttttttaggtcaatcaagactccaaaatagtgattcctaacctttttggagttgctctgctactctgaatatgttctatacagcataaggattgtcaccttctgtgtgttgcaacagcttctaagataattagggacaaatgatgttacaaaaggaagagtactgctggtctaagtgctgagttgtatgtctttgcatagctccactctgctgctaaatatgcatgttctgactgacaccatcttgatgccagtactggattccagcattcagcaggtgcagatctcggctttacacaatttatctttacctagggttcagtcagtaatttctgctttttagccagggccagtgcagggtcagttaatgctacagttactgtatagcaaacagtatccttttttctccttcccctagcctattgggctttgcagatatctggagtgttttaaagtcaattattttaagcagtttgaggggatgtgtaggagtggagcatgaaacagtttataaggctggggctgtattatcagcacagcaaattaaagaatgaaagaagtacttctttttacatttcagctccagcagccagctatttaaaaaatatttttaaatatcttccccaaagtttaagatgtgggaccatctacttgtaagaaacagtggcttatttcttcatttctcagtaatcattgtaaacctttttttttttcttctccactctaacaaaagtaaaagaacaaaacttttgctgaggtcttggactccactacttgttagttatgttggcctggacagatggcaggtctgtcggcagttcctcagtctgtaaaatgaagattatcattcttgcctctccctttgtcacagtgttgtcgtgaagatcagatatgtatgaatgcagtcaaataaactaaaaactaggaaagtgttaactatcgttgcccaccgaatttgaggtagcaaaaaaaaaaaagaatgttctggtacatgaacagactgagaaggcctttcgacatccctgaagctagtctcctgtctagactaaaaatatccttgaaagaatagtagcaaacagtatgcagtactcctgtgttctaagttcttttatgttttagtttaccctcacagcagccatagtgttaagtcattatgagcttcatcttaaagataagaaaactgaggcaaggggagattaacttactgccaaatttcaaacagttagtagtatttgagaccagtagtatggctctaatcttacccttagccctcccaaccattatgctgtactatctacccataaatacctccaggaaacattcccctcttggtaatttgtccttctatagaagcttcaaagattaaatcaaattaattttcaaaaaaaatttttttttagaaatgttattttccctgtgatagaggatgacttcccagtttcaccaaagtctgtttatatcaacacacacaaaatggaataattctgagtcactaggcaatcaatctactgtggttttactatgtaaggtgaaaattaactggaacgatgtttgtttgctatacttacatagtcaaactttacaagccatgaaattaattgcactctttgtatttgttgttaaatgcctaagaagttttctaaaaattttgtaaaggcactgtcagagaatctggagttgaatgattattccagatactgtataacctgcataactttttgtctttaagtcgtgtttgtaaaagaagtaattgctagaaacatttgataatgtacaaagtagtctataatgactgttcagtacatttttaatatttttttggttatatccaactttttgtaaatatactggaagcttgataataaaatgtatttcctatcaccatacttttccatgtgaaaacctgagcctatttctagtataagtatccaaagaaaagttttacctggttgtgttattttaccagac

SEQ ID NO: 119 - DNA, 1663 bp, human
acgaggcgcgggtgaggcttaacgcgcaggaggtctcacgagagtggaagcaactctcgcgaattttaaaatttatctttttgcctagcgactgacaacaggctggttgcttggcgtggaatcctaaagtggcctggctttgagactggagtgagaccccagccctaggtggtacatttccattatagaggagacggattcagaagggctacagaccaaggttgttgaaaaccagacatatgatgagcgtctagagattaacgactccgaagaggttgcaagtatttatactccaaccccaagacaccaaggacttcctcgttctgcccatcttcctaacaaggctatggctgataacagcagtgatgagtgtgaagaggaaaataacaaggagaagaagaagacctcacagttgacacctcaacggggctttagtgaaaatgaggatgacgatgatgatgatgatgattcatctgaaactgattctgattctgatgatgatgatgaagagcatggagcccctctggaaggggcctatgaccctgcagactatgagcatttgccagtttctgctgaaattaaggaactcttccagtacatcagtaggtacacacctcagttgattgacctggaccacaaactgaagcctttcattcctgattttatcccagctgtcggggatattgatgcattcttaaaggtcccacgtcctgatggaaagcctgacaaccttggcctattggtattggatgaaccttctacaaagcagtcagaccctacggtgctctcactctggttaacagagaattctaagcagcacaacatcacacaacatatgaaagtaaaaagcctagaagatgcagaaaagaatcccaaagccattgacacgtggattgagagcatctctgaattacaccgttctaagccccctgcgactgtgcactacaccaggcccatgcccgacattgacacgctgatgcaggaatggtccccggagtttgaagagcttttgggcaaggtaagcctgcccacggcagagattgattgcagcctggcagagtacattgacatgatctgtgccattctagacatccctgtctacaagagtcggatccagtccctccatctgctcttttccctctactcagaattcaagaactcacagcattttaaagctctcgctgaaggcaagaaagcattcactccttcatccaattccacctcccaagctggagacatggagacattaaccttcagctgagacacttcccaagctgctgtttcaaggctgagctggcccctctgccccagctgagatggacagatcgttgtcagctacttgatgtccttgcccatgccacagcttggctcaggggcagtgcatgtcctgctgccctctctgccagagggcacagaacatgtttgtttaatgaacctgcctgcctcagattgctgtccccggggagttaatgcatctacaccactgtggggatttgagttataagaattggaatttctgagatcccatggaggttagattgggaggaaagcttaaaagatgtcctttttgtgagagggatggaattgttttctttcattcgtaaagttagtgagtaaagattttataaatcaaaaaaaaaaaaaaaaaaaaaaaaaaaaaaaa

SEQ ID NO: 120 - DNA, 1436 bp, human
cagctggagtgcgttctgccgaagcttgtggttgcacgcccatcgtcttaggggctaccttccgtgaccatgtccaagtctctgaagaagttggtggaggagagccgggagaagaaccagcccgaggtggacatgagtgaccggggcatctccaacatgctggatgtcaacggcctctttaccttatcccatatcacacaactggtcctcagccataacaagctaacaatggtgccaccgaacatcgcagaactgaagaatttggaggtgctcaacttttttaataaccaaatcgaggagctgcccacacagatcagtagccttcagaaactcaaacacctgaaccttggcatgaacaggctgaacactttgccacgaggcttcggctccctgccagctcttgaggttctggacttgacgtacaacaacttgagcgaaaattctcttcctggaaacttcttctacctgaccaccctgcgtgcactctatctaagtgacaacgattttgaaatcctgccgccagatattgggaagctcacaaagttgcagatactcagccttagggataacgacctgatctcgctgcctaaggaaatcggggagcttacccagcttaaagagctccacattcaggggaaccgcctcaccgttctgcccccagaactaggaaacttggatttaactggccagaagcaggtattcaaagcagagaacaatccctgggtgacccccattgcagaccagttccagcttggcgtgtcccatgtttttgagtatatccgttctgagacatacaaatacctctacggcagacacatgcaggccaacccagaaccaccgaagaagaataatgacaaatcgaaaaagatcagccggaaacccctggcagccaagaacagataaggaagggattggcatcggctggccttccagcaccttctctctccaacacttcattctctcttgccctgtctctcaaataaacccaatgctgcgtgtgaggccttttttatttttcttttcactctctttctaatgcttcccaccttaccttttagattcttttgctaggtgggagattgttataaggtctttaaaccatttccatttgtttctttaacattaccaaaagcagggaacaaagctcttattcaactgcgaattccatagtgggctctggcttttcttgaatagatatcacaaggttgcttattatcaaaagaataattaaaatcatgtaaccatttaaatgtcactgttaacacttttcactctttctgttgattcacctaactcattattttgctttattaaaagtcttccttcaccaccgagatatgctaatttaacttacaaatgattttaataaaatcttgagtttgtatcacatgttacttattgactcagaataaaagaacagtctgatcttggggtat

SEQ ID NO: 121 - DNA, 2216 bp, human
tttccgcagttaggggctgctatttcaacgcagggagataaaaagaaaaaaacacttgctcttctaccccgctaaaaacactcatcctagggagcacgccagcatttgcagcgttcggggcagggccactcggcctgcggccgttgcactggctggaagctggcaggcgatcacggttgattggctcgggtgcggtccaagggcagcaacgccttcggcgggccgcctagggtgattggctgctgcagcccaccccctagccggtttggtgggcggcgaagcctggattggtggagctaagagctggctcagtttcagcgctggctcttcgtgcatggcagagatggcgactgcgactcggctgctggggtggcgtgtggcgagctggaggctgcggccgccgcttgccggcttcgtttcccagcgggcccactcgcttttgcccgtggacgatgcaatcaatgggctaagcgaggagcagaggcagcttcgtcagaccatggctaagttccttcaggagcacctggcccccaaggcccaggagatcgatcgcagcaatgagttcaagaacctgcgagaattttggaagcagctggggaacctgggcgtattgggcatcacagcccctgttcagtatggcggctccggcctgggctacctggagcatgtgctggtgatggaggagatatcccgagcttccggagcagtggggctcagttacggtgcccactccaacctctgcatcaaccagcttgtacgcaatgggaatgaggcccagaaagagaagtatctcccgaagctgatcagtggtgagtacatcggagccctggccatgagtgagcccaatgcaggctctgatgttgtctctatgaagctcaaagcggaaaagaaaggaaatcactacatcctgaatggcaacaagttctggatcactaatggccctgatgctgacgtcctgattgtctatgccaagacagatctggctgctgtgccagcttctcggggcatcacagccttcattgtggagaagggtatgcctggctttagcacctctaagaagctggacaagctggggatgaggggctctaacacctgtgagctaatctttgaagactgcaagattcctgctgccaacatcctgggccatgagaataagggtgtctacgtgctgatgagtgggctggacctggagcggctggtgctggccggggggcctcttgggctcatgcaagcggtcctggaccacaccattccctacctgcacgtgagggaagcctttggccagaagatcggccacttccagttgatgcaggggaagatggctgacatgtacacccgcctcatggcgtgtcggcagtatgtctacaatgtcgccaaggcctgcgatgagggccattgcactgctaaggactgtgcaggtgtgattctttactcagctgagtgtgctacacaggtagccctggacggcattcagtgttttggtggcaatggctacatcaatgactttcccatgggccgctttcttcgagatgccaagctgtatgagataggggctgggaccagcgaggtgaggcggctggtcatcggcagagccttcaatgcagactttcactagtcctgagacccttcgcccccttttcctgcacctagtggcctttcttgggaagtagagatgtggcggctttcccaccctgcccacagcaggccctcctgcccagctgctcttgtcagccctctggcctctggatgaggttgagttctccacaacagctcccaagcatcatgggcctcgcagccgggcctgtgccacggctagtgttgtgtgatttaaaatggactcagcaggaagcatattgtctggggattgttgggacaggttttggtgactctgtgcccttgctctctaacttctgagcccacctcccagggtaggcacctgggggcatgcaggtgcccacctcccagggtaggcacctgggggcatgcaggtacccacctctttctcttgggtgaggctctggcaaggagatctctctgctcaagcacagcagaatcatggcccctctccatgaattggaacttggtacaggttaagtatccctaatcctgaaatctgaaacacttgtggttccaagcattttggataaggcaaattcaactttcagtctcttttctgggggaaaaaaataataaacctagcctagccaggcgtggtg

SEQ ID NO: 122 - DNA, 1599 bp, human
ggaccaaagctgacagtttctttacttgcaggtagctgacagcatctactcctgaagaccggaaacatggcttgtaccatccaaaaggcagaagcacttgacggggctcatttgatgcagatcctctggtatgatgaggaagagtctctctacccagctgtatggttgagagacaactgtccgtgctctgattgctacctggattctgcaaaagcacggaaacttctagtggaagctcttgatgtgaacattggaattaaaggcttgatatttgacagaaaaaaggtgtacatcacatggcccgatgagcattacagtgaattccaggctgattggctgaagaaaagatgcttttccaagcaggccagagcaaagctccaaagagaattgttttttccagaatgccaatactggggctcagagctccagctacccactttggattttgaagatgttttaagatatgatgaacatgcatacaagtggctctccaccctcaagaaagtaggcatagtaagactcaccggagcatctgacaaaccaggagaagtttcaaaacttgggaaaaggatgggtttcctctatctcacattttatggacatacttggcaagtgcaagacaaaatcgatgcaaacaatgtggcttacacaactgggaagctaagctttcacactgattatccagccctccatcatccacctggggttcagcttcttcactgcataaagcaaacagtcacagggggtgattcagaaattgtagatgggtttaatgtgtgccaaaaactaaagaaaaataatcctcaggcattccagattttgtcctctacctttgtggactttacagacattggagtggattactgtgatttttctgtacaatcaaaacataaaattatagagttagatgataaaggccaagtggttcgcatcaacttcaataacgcaactagggacacaatatttgatgtacctgttgaaagagttcagcctttttatgctgctctgaaggagtttgttgacctcatgaacagcaaagaatccaagtttaccttcaagatgaatccaggtgatgtgattacttttgataactggcgcttacttcatggccgacgtagctatgaagcaggaactgagatatcccgccatctagaaggagcttatgctgactgggatgtggtcatgtcaaggcttcgtatcttaaggcagagggtggagaatggaaactgaagtcacctgtagataattttaataagattccaatgaccatattttgtgagatatggcacattattcacagaccatgatctttgtgatttacatataatttccttaacaatgaacatgtaacttctctcacaagagtactctttactttgtaatcatatacaatgtcaactttttagatgtttcaccactcttttgcaaataaagcatcctttctgctctgttgcatgcctgctctaatttcttttgcccatatatgagtatctccagaatgtctacaaatagtttttgtagcaaatgaaaatttcttcaaataagccttttgtttcaaataaaacttgtctcaaaacatgcttcaaaaaaaaaaaaaaa

SEQ ID NO: 123 - DNA, 2510 bp, human
gcggccgcgagcaacggcagcggcggcggcggcggcggcatcagcgctggcggcggcgtcgcttccagcacccccatcaacgccagcaccggcagcagcagcagcagcagtagcagcagcagcagcagcagcagtagtagcagcagcagcagtagcagcagcagctgcggccccctccccgggaaacccgtgtactcaaccccgtccccagtggaaaacacccctcagaataatgagtgcaaaatggtggatctgaggggggccaaagtggcttccttcacggtggagggctgcgagctgatctgcctgccccaggctttcgacctgttcctgaagcacttggtggggggcttgcatacggtctacaccaagctgaagcggctggagatcacgccggtggtgtgcaatgtggaacaagttcgcatcctgaggggactgggcgccatccagccaggagtgaaccgctgcaaactcatctccaggaaggacttcgagaccctctacaatgactgcaccaacgcaagttctagacctggaaggcctcctaagaggactcaaagtgtcacctccccagagaactctcacatcatgccgcattctgtccctggtctcatgtctcctgggataattccaccaacaggtctgacagcagccgctgcagcagctgctgctgctaccaatgcagctattgctgaagcaatgaaggtgaaaaaaatcaaattagaagccatgagcaactatcatgccagtaataaccaacatggagcagactctgaaaacggggacatgaattcaagtgtcggactggaacttccttttatgatgatgccccaccctctaattcctgtcagcctacctccagcatctgtcaccatggcaatgagccagatgaaccacctcagcaccattgcaaatatggcagcagcagcacaagttcagagtcccccatccagagttgagacatcagttattaaggagcgtgttcctgatagcccctcacctgccccctctctggaggaggggagaaggcctggcagtcacccatcatcacatcgcagcagcagcgtgtccagctcccctgctcggactgagagctcttccgacagaatcccggtccatcagaatgggttgtccatgaaccagatgctgatgggcttatcaccaaatgtacttcctgggcccaaagagggagatttggccggtcatgacatgggacatgagtcaaaaaggatgcatattgaaaaagatgagaccccgctttctacaccaaccgcaagagacagccttgacaaactctctctaactgggcatggacaaccactgcctccaggttttccatctccttttctgtttcctgatggactgtcttccatcgagactcttctgactaacatacaggggctgttgaaagttgccatagataatgccagagctcaagagaaacaggtccaactggaaaaaactgagctgaagatggattttttaagggaaagagaactaagggaaacacttgagaagcagttggctatggaacaaaagaatagagccatagttcaaaagaggctaaagaaggagaagaaggcaaagagaaaattgcaggaagcacttgagtttgagacgaaacggcgtgaacaagcagaacagacgctaaaacaggcagcttcaacagatagtctcagggtcttaaatgactctctgaccccagagatagaggctgaccgcagtggcggcagaacagatgctgaaaggacaatacaagatggaagactgtatttgaaaactactgtcatgtactgaatctttcctgttgaagaaatccatgttatagaaaagaactttgcagtcagacattcgtcatgggaaagttcagaaaaaaataaagtccttttaagggaacttcctgaattttgtgtattaatgttctttaaaagtttaagtattctacaaaaaaaaaaaaaagttttctccattgattttcacctgtggttcataccagagacctgagaatgtttgtaaatgtacaagtatcaaagttcttacagttaattactgcaacttgctgctggacaattgtatacagagttaaaggcaggtctgaataagacctagctttgtttttttctaatggaatgaaccattttcctcttctgaaaattctgtatctgagcacatcaagagactcttgtagcagtggttacccagacttacagaattatgtcctccagaaaccagcaagaacacttggaatgaacgaatgaacttgtagggggcatagaggattcttgaaaaaaaaaaatgcaagagtgattttctgttacattcaatttcaaactctctaattgtgggttttctcctgaagaattttttttcacatactttccaaaagaccaacaaatggatgttgacaacaacccaatgaaataacattttgcatatctgaaaagaagcattgaatataagccaaaagctttcactgaaggtttttttttcttaaaaaaaaaaaaaaaaaa

SEQ ID NO: 124 - DNA, 1982 bp, human
aaaaaaaaaaaaaaaaactcagttgcctctggccagtgcagggctcagccagggatggcttctagctgacagtgggaggaattaattcatctgaccggaatattcttttctcttctgggctgttggtttttcaagtgcaacaaagattccatacagctccaaggaaggagccaagaaaaacattctgtgccaaagtgagatcctggaagtgaaaccccggaataaagctgaaaagcgggctccagttgggtgccaggaaatgcaggactggaatgtgacttgacttccggcagcgcgcaggtgctcccgggtcacctgctttgaggtccagcctcctgccctgcctcaggtgaccacatgaccactgtggactttgccctgaaaccttctgggaggagaagaggcctgaccttggcgctggggtccagtgggcattgctctggtccgaggctgctgctcttgacctctgctctgcggctgttttccattggagtagaggctcctcctgtcctgtcctgcctgtggagggaagcaaaccttcccctggaccagagagaggagaaagcggagacaggtagcaacgctgtggactggtgatgacaggctcttcagctccctgcaagtgaccgggcctggggaacagggcatggcacaggcacacaggaccccccagcccagggctgcccccagccagccccgtgtgttcaagctggttctcctgggaagtggctccgtgggtaagtccagcttggctcttcggtacgtgaagaacgacttcaagagtatcctgcctacggtgggctgtgcgttcttcacaaaggtggtggatgtgggtgccacctctctgaagcttgagatctgggacacagctggccaggagaagtaccacagcgtctgccacctctacttcaggggtgccaacgctgcgcttctggtgtacgacatcaccaggaaggattccttcctcaaggctcagcagtggctgaaggacctggaggaggagctgcacccaggagaagtcctggtgatgctggtgggcaacaagacggacctcagccaggagcgggaggtgaccttccaggaagggaaggagtttgccgacagccagaagttgctgttcatggaaacttcggccaaactgaaccaccaggtgtcggaggtgttcaatacagtggcccaagagctactgcagagaagcgacgaggagggccaggctctacggggggatgcagctgtggctctgaacaaggggcccgcgaggcaggccaaatgctgcgcccactaggtgcagccactcctgggggctgtggggaagacaccccctgcctgggccatggccagctctaggtggattctgattcactgtcaatgctgggttgctcccgagccctagatgttcctggaagttggccccctttatgaaaaccacttcccacagccagtgggaactgccagaggaagatctggcgtcacatggctcccaggaaagtgctgtgccctatccccactgataccatctgattccccgatgcctgtgcctgttccacctggacggtggccccctcagcctggcagcctctggacagagaggaaggaaggattggaaaagtccccgcagcacagcgacggtgggaagatgccttacgtctgatcttgatgggggcactggcctggagcctgggcccacctgcttctggggggttggggagcaggccagatggaggtggtggtgccaggaagaaatggagcgatgactgactgtggggtgggcccaggatttccacatcttggtgaagttgcccctgggaagggcagctgggggcagtggcgccagttcccttccatggtctcccggctggcaatgtggtgaagctgagtttctgtccaatgagcaggaagattctgagacatttcgcctgagatataagttgtactgcgtatgcagtttttcctccaaaaattaaattgcttttgacaatctg

SEQ ID NO: 125 - DNA, 3500 bp, human
cgccaaaggaaaagccccttggatgagaggcaggcgcttcagagaagctaagaaaagcacctctccgcgcgccccacctcctccgcctcgcgctcctcctgagcagcgggcccagactgcgctccggccgcggccctcgccccgcggagccctcctaccccggcccgacgctcggcccgcgacctgccccgagccctctccatggaggcagcccgcccctccggctcctggaacggagccctctgccggctgctcctgctgaccctcgcgatcttaatatttgccagtgatgcctgcaaaaatgtgacattacatgttccctccaaactagatgccgagaaacttgttggtagagttaacctgaaagagtgctttacagctgcaaatctaattcattcaagtgatcctgacttccaaattttggaggatggttcagtctatacaacaaatactattctattgtcctcggagaagagaagttttaccatattactttccaacactgagaaccaagaaaagaagaaaatatttgtctttttggagcatcaaacaaaggtcctaaagaaaagacatactaaagaaaaagttctaaggcgcgccaagagaagatgggctccaattccttgttcgatgctagaaaactccttgggtccttttccacttttccttcaacaggttcaatctgacacggcccaaaactataccatatactattccataagaggtcctggagttgaccaagaacctcggaatttattttatgtggagagagacactggaaacttgtattgtactcgtcctgtagatcgtgagcagtatgaatcttttgagataattgcctttgcaacaactccagatgggtatactccagaacttccactgcccctaataatcaaaatagaggatgaaaatgataactacccaatttttacagaagaaacttatacttttacaatttttgaaaattgcagagtgggcactactgtgggacaagtgtgtgctactgacaaagatgagcctgacacgatgcacacacgcctgaagtactccatcattgggcaggtgccaccatcacccaccctattttctatgcatccaactacaggcgtgatcaccacaacatcatctcagctagacagagagttaattgacaagtaccagttgaaaataaaagtacaagacatggatggtcagtattttggtctacagacaacttcaacttgtatcattaacattgatgatgtaaatgaccacttgccaacatttactcgtacttcttatgtgacatcagtggaagaaaatacagttgatgtggaaatcttacgagttactgttgaggataaggacttagtgaatactgctaactggagagctaattataccattttaaagggcaatgaaaatggcaattttaaaattgtaacagatgccaaaaccaatgaaggagttctttgtgtagttaagcctttgaattatgaagaaaagcaacagatgatcttgcaaattggtgtagttaatgaagctccattttccagagaggctagtccaagatcagccatgagcacagcaacagttactgttaatgtagaagatcaggatgagggccctgagtgtaaccctccaatacagactgttcgcatgaaagaaaatgcagaagtgggaacaacaagcaatggatataaagcatatgacccagaaacaagaagtagcagtggcataaggtataagaaattaactgatccaacagggtgggtcaccattgatgaaaatacaggatcaatcaaagttttcagaagcctggatagagaggcagagaccatcaaaaatggcatatataatattacagtccttgcatcagaccaaggagggagaacatgtacggggacactgggcattatacttcaagacgtgaatgataacagcccattcatacctaaaaagacagtgatcatctgcaaacccaccatgtcatctgcggagattgttgcggttgatcctgatgagcctatccatggcccaccctttgactttagtctggagagttctacttcagaagtacagagaatgtggagactgaaagcaattaatgatacagcagcacgtctttcctatcagaatgatcctccatttggctcatatgtagtacctataacagtgagagatagacttggcatgtctagtgtcacttcattggatgttacactgtgtgactgcattaccgaaaatgactgcacacatcgtgtagatccaaggattggcggtggaggagtacaacttggaaagtgggccatccttgcaatattgttgggcatagcattgctcttttgcatcctgtttacgctggtctgtggggcttctgggacgtctaaacaaccaaaagtaattcctgatgatttagcccagcagaacctaattgtatcaaacacagaagctcctggagatgacaaagtgtattctgcgaatggcttcacaacccaaactgtgggcgcttctgctcagggagtttgtggcaccgtgggatcaggaatcaaaaacggaggtcaggagaccatcgaaatggtgaaaggaggacaccagacctcggaatcctgccggggggctggccaccatcacaccctggactcctgcaggggaggacacacggaggtggacaactgcagatacacttactcggagtggcacagttttactcagccccgtcttggtgaagaatccattagaggacacactctgattaaaaattaaacaatgaaagaaagtgtatctgtgtaatcaagatgaaaatcacaagcatgcccaagactatgtcctgacatataactatgaaggaagaggatcggtggctgggtctgtaggttgttgcagtgaacgacaagaagaagatgggcttgaatttttggataatttggagcccaaatttaggacactagcagaagcatgcatgaagagatgagtgtgttctaataagtctctgaaagccagtggctttatgacttttaaaaaaaattacaaaccaagaattttttaaagcagaagatgctatttgtgggggtttttctctcattatttggatggaatctctttggtcaaatgcacatttacagagagacactataaacaagtacacaaatttttcaatttttacatatttttaaattacttatcttctatccaaggaggtctacagagaaattaaagtctgccttatttgttacatttgggtataatgacaacagccaatttatagtgcaataaaatgtaattaattcaagtccttattatagactatttgaagcacaacctaatggaaaattgtagagaccttgctttaacattatctccagttaattaagtgttcatgtggtgcttggaaactgttgttttcctgaacatctaaagtgtgtagactgcattcttgctattattttattcttgtaatgtgaccttttcactgtgcaaagggagatttctagccaggcattgactattacaatttcatt

SEQ ID NO: 126 - DNA, 1637 bp, human
gaggcgaaccggagcgcggggccgcggtcgccccgaccagagccgggagaccgcagcacccgcagccgcccgcgagcgcgccgaagacagcgcgcaggcgagagcgcgcgggcgggggcgcgcaggccctgcccgccccttccgtccccacccccctccgccctttcctctccccaccttcctctcgcctcccgcgcccccgcaccgggcgcccaccctgtcctcctcctgcgggagcgttgtccgtgttggcggccgcagcgggccgggccggtccggcgggccgggggatggcgctgctggacctggccttggagggaatggccgtcttcgggttcgtcctcttcttggtgctgtggctgatgcatttcatggctatcatctacacccgattacacctcaacaagaaggcaactgacaaacagccttatagcaagctcccaggtgtctctcttctgaaaccactgaaaggggtagatcctaacttaatcaacaacctggaaacattctttgaattggattatcccaaatatgaagtgctcctttgtgtacaagatcatgatgatccagccattgatgtatgtaagaagcttcttggaaaatatccaaatgttgatgctagattgtttataggtggtaaaaaagttggcattaatcctaaaattaataatttaatgccaggatatgaagttgcaaagtatgatcttatatggatttgtgatagtggaataagagtaattccagatacgcttactgacatggtgaatcaaatgacagaaaaagtaggcttggttcacgggctgccttacgtagcagacagacagggctttgctgccaccttagagcaggtatattttggaacttcacatccaagatactatatctctgccaatgtaactggtttcaaatgtgtgacaggaatgtcttgtttaatgagaaaagatgtgttggatcaagcaggaggacttatagcttttgctcagtacattgccgaagattactttatggccaaagcgatagctgaccgaggttggaggtttgcaatgtccactcaagttgcaatgcaaaactctggctcatattcaatttctcagtttcaatccagaatgatcaggtggaccaaactacgaattaacatgcttcctgctacaataatttgtgagccaatttcagaatgctttgttgccagtttaattattggatgggcagcccaccatgtgttcagatgggatattatggtatttttcatgtgtcattgcctggcatggtttatatttgactacattcaactcaggggtgtccagggtggcacactgtgtttttcaaaacttgattatgcagtcgcctggttcatccgcgaatccatgacaatatacatttttttgtctgcattatgggacccaactataagctggagaactggtcgctacagattacgctgtgggggtacagcagaggaaatcctagatgtataactacagctttgtgactgtatataaaggaaaaaagagaagtattataaattatgtttatataaatgcttttaaaaatctaccttctgtagttttatcacatgtatgttttggtatctgttctttaatttatttttgcatggcacttgcatctgtgaaaaaaaa

SEQ ID NO: 127 - DNA, 911 bp, human
ctgtcgcctgcagctgctcgcctgtctccgtcggaagggagcccaagctttgcagagaacatgaacgattggatgcccatcgccaaggagtatgatccactcaaagcgggcagcattgatggcaccgatgaagacccacacgaccgcgcggtctggagggcaatgctggcacgatatgtccccaacaaaggtgtcataggagatcccctcctcaccctgtttgtggccagactaaacttgcagaccaaggaggacaaattaaaggaagtcttttcccgctatggtgacatccggcggcttcggctggtcagggacttggtcacaggtttttcaaagggctacgccttcatcgaatacaaggaggagcgtgccgtgatcaaagcttaccgagatgctgatggcctggttattgaccagcatgagatatttgtggactacgagctggaaaggactctcaaagggtggatccctcggcgacttggaggcggtcttgggggaaaaaaggagtctgggcaactgagatttgggggacgggaccggccttttcgaaaacctattaacttgccagttgttaaaaacgacctctatagagagggaaaacgggaaaggcgggagcgatctcgatcccgagaaagacactgggactcgaggacaagggatcgagaccatgacaggggccgggagaagagatggcaagaaagagagccgaccagggtgtggcccgacaatgactgggagagagagagggacttcagagatgacaggatcaaggggagggagaagaaggaaagaggcaagtagaggcccaacagcagaaccccaaagtgaagttacagtggaaatgagtggagggggattgtctttcaacgcagcgtgagtctaatggttgaataaaacttactgatgaaaaa

SEQ ID NO: 128 - DNA, 1985 bp, human
cgccgagctttcggcacctctgccgggtggtaccgagccttcccggcgccccctcctctcctcccaccggcctgcccttccccgcgggactatcgcccccacgtttccctcagcccttttctctcccggccgagccgcggcggcagcagcagcagcagcagcagcaggaggaggagcccggtggcggcggtggccggggagcccatggcgtacagtcaaggaggcggcaaaaaaaaagtctgctactactacgacggtgatattggaaattattattatggacagggtcatcccatgaagcctcatagaatccgcatgacccataacttgctgttaaattatggcttatacagaaaaatggaaatatataggccccataaagccactgccgaagaaatgacaaaatatcacagtgatgagtatatcaaatttctacggtcaataagaccagataacatgtctgagtatagtaagcagatgcatatatttaatgttggagaagattgtccagcgtttgatggactctttgagttttgtcagctctcaactggcggttcagttgctggagctgtgaagttaaaccgacaacagactgatatggctgttaattgggctggaggattacatcatgctaagaaatacgaagcatcaggattctgttacgttaatgatattgtgcttgccatccttgaattactaaagtatcatcagagagtcttatatattgatatagatattcatcatggtgatggtgttgaagaagctttttatacaacagatcgtgtaatgacggtatcattccataaatatggggaatactttcctggcacaggagacttgagggatattggtgctggaaaaggcaaatactatgctgtcaattttccaatgtgtgatggtatagatgatgagtcatatgggcagatatttaagcctattatctcaaaggtgatggagatgtatcaacctagtgctgtggtattacagtgtggtgcagactcattatctggtgatagactgggttgtttcaatctaacagtcaaaggtcatgctaaatgtgtagaagttgtaaaaacttttaacttaccattactgatgcttggaggaggtggctacacaatccgtaatgttgctcgatgttggacatatgagactgcagttgcccttgattgtgagattcccaatgagttgccatataatgattactttgagtattttggaccagacttcaaactgcatattagtccttcaaacatgacaaaccagaacactccagaatatatggaaaagataaaacagcgtttgtttgaaaatttgcgcatgttacctcatgcacctggtgtccagatgcaagctattccagaagatgctgttcatgaagacagtggagatgaagatggagaagatccagacaagagaatttctattcgagcatcagacaagcggatagcttgtgatgaagaattctcagattctgaggatgaaggagaaggaggtcgaagaaatgtggctgatcataagaaaggagcaaagaaagctagaattgaagaagataagaaagaaacagaggacaaaaaaacagacgttaaggaagaagataaatccaaggacaacagtggtgaaaaaacagataccaaaggaaccaaatcagaacagctcagcaacccctgaatttgacagtctcaccaatttcagaaaatcattaaaaagaaaatattgaaaggaaaatgttttctttttgaagacttctggcttcattttatactactttggcatggactgtatttattttcaaatgggactttttcgtttttgtttttctgggcaagttttattgtgagattttctaattatgaagcaaaatttcttttctccaccatgctttatgtgatagtatttaaaattgatgtgagttattatgtcaaaaaaactgatctattaaagaagtaattggcctttctgagctgaaaaaaaaaaaaaaaaag

SEQ ID NO: 129 - DNA, 1328 bp, human
gtgtcccatctagatgcttgactcagtgatgcagaacctttcagagttagctggaagccacagccctgcctcttgatgcagcctggatccagccggtgtgaagaggagaccccttccctcttgtggggtttggatcctgtgtttctagcctttgcaaaactctacatcagggatatcctggacatgaaggagtcccgccaggtgccaggtgtatttttgtacaatggacatccaataaaacaggtagatgtcttgggaactgtcattggagtgagagaaagagatgctttctacagttatggagtggatgacagcactggagttataaactgcatctgctggaaaaagttgaatactgagtctgtatcagctgctccaagtgcagcaagagagctcagcttaacctcacaacttaagaagctacaagagaccattgagcagaaaacaaagatagagatcggggacacgatccgagtcagaggcagtatccgcacatacagagaagagcgagagattcatgccaccgcttactataaagtggacgacccagtgtggaacattcaaattgcaaggatgcttgagctgcccactatctacaggaaagtttatgaccagccttttcacagctcagccctagagaaagaagaggcactaagcaatccaggcgccctggacctccccagtctcacgagtttgctgagtgaaaaagccaaagaattcctcatggagaacagagtgcagagcttttaccagcaggagctggaaatggtggagtctttgctgtcccttgccaatcagcctgtgattcacagtgcctgctccgaccaagtgaattttaagaaggacaccacttccaaggcaattcatagtatatttaagaatgctatacaactgctgcaggaaaaaggacttgttttccagaaagatgatggttttgataacctatactatgtaaccagagaagacaaagacctgcacagaaagatccaccggatcattcagcaggactgccagaaaccaaatcacatggagaagggctgtcacttcctgcacatcttggcctgtgctcgcctgagcatccgcccgggcctgagcgaggctgtgctgcagcaagttctggagctcctggaggaccagagtgacattgtcagcacaatggagcactactacacagcgttctgagcagagacacgcagaccagctgaggaggacaaagataaggtggcattcacccccaggctctgactttcagcatcatgcaggggcttatctgtctggaggcagttacctcataataaactataaaatataaaaaaaaaaaaaaaaaa

SEQ ID NO: 130 - DNA, 1126 bp, human
gccagaggcgaccggaaggatctttctagtccagcccctcgctttacccggacgaaagacacgggcctgattcgtcgagtctcactgagccttagtcgtcggcaggtcccaggcgcgaagtttctcggcctggaggagggggtcgcgcgaagtgccagatgcaggcggggaagcccatcctctattcctatttccgaagctcctgctcatggagagttcgaattgctctggccttgaaaggcatcgactacgagacggtgcccatcaatctcataaaggatgggggccaacagttttctaaggacttccaggcactgaatcctatgaagcaggtgccaaccctgaagattgatggaatcaccattcaccagtcactggccatcattgagtatctagaggagatgcgtcccactccgcgacttctgcctcaggacccaaagaagagggccagcgtgcgtatgatttctgacctcatcgctggtggcatccagcccctgcagaacctgtctgtcctgaagcaagtgggagaggagatgcagctgacctgggcccagaacgccatcacttgtggctttaacgccctggagcagatcctacagagcacagcgggcatatactgtgtaggagacgaggtgaccatggctgatctgtgcttggtgcctcaggtggcaaatgctgaaagattcaaggtggatctcaccccctaccctaccatcagctccatcaacaagaggctgctggtcttggaggccttccaggtgtctcacccctgccggcagccagatacacccactgagctgagggcctagctcccaaatcctgccccgttggcacagggccacaggagcagaagctgggtgggctgaagaggcctggaaacgagagtcttaattgaggagatgggagactcgaactctagccctggatctgccttcctgctgaaacttgttccacctcagtcccctcatctgtcacacgcatgtggggtggagtagggagatgcggggagcagggtgggcaggaatactgttatctatgtgacggggcagtcgtgaggctgagatgagaatgcggattaaaatgcctggcgtgctcaccgtaacaccaaaaaaaaaaaaaaaaaaaa

SEQ ID NO: 131 - DNA, 2796 bp, human
aattaaatgcatatgttctccaagaaccacctaaaggagaaacctacacctacgactggcagctgattactcatcctagagactacagtggagaaatggaagggaaacattcccagatcctcaaactatcgaagctcactccaggcctgtatgaattcaaagtgattgtagagggtcaaaatgcccatggggaaggctatgtgaacgtgacagtcaagccagagccccgtaagaatcggccccccattgctattgtgtcacctcagttccaggagatctctttgccaaccacttctacagtcattgatggcagtcaaagcactgatgatgataaaatcgttcagtaccattgggaagaacttaaggggcctctaagagaagagaagatttctgaagatacagccatattaaaactaagtaaactcgtccctgggaactacactttcagcttgactgtagtagactctgatggagctaccaactctactactgcaaacctgacagtgaacaaagctgtggattacccccctgtggccaacgcaggccccaaccaagtgatcaccctgccccaaaactccatcaccctctttgggaaccagagcactgatgatcatggcatcaccagctatgagtggtcactcagcccaagcagcaaagggaaagtggtggagatgcagggtgttagaacaccaaccttacagctctctgcgatgcaagaaggagactacacttaccagctcacagtgactgacacaataggacagcaggccactgctcaagtgactgttattgtgcaacctgaaaacaataagcctcctcaggcagatgcaggcccagataaagagctgacccttcctgtggatagcacaaccctggatggcagcaagagctcagatgatcagaaaattatctcatatctctgggaaaaaacacagggacctgatggggtgcagctcgagaatgctaacagcagtgttgctactgtgactgggctgcaagtggggacctatgtgttcaccttgactgtcaaagatgagaggaacctgcaaagccagagctctgtgaatgtcattgtcaaagaagaaataaacaaaccacctatagccaagataactgggaatgtggtgattaccctacccacgagcacagcagagctggatggctctaagtcctcagatgacaagggaatagtcagctacctctggactcgagatgaggggagcccagcagcaggggaggtgttaaatcactctgaccatcaccctatcctttttctttcaaacctggttgagggaacctacacttttcacctgaaagtgaccgatgcaaagggtgagagtgacacagaccggaccactgtggaggtgaaacctgatcccaggaaaaacaacctggtggagatcatcttggatatcaacgtcagtcagctaactgagaggctgaaggggatgttcatccgccagattggggtcctcctgggggtgctggattccgacatcattgtgcaaaagattcagccgtacacggagcagagcaccaaaatggtattttttgttcaaaacgagcctccccaccagatcttcaaaggccatgaggtggcagcgatgctcaagagtgagctgcggaagcaaaaggcagactttttgatattcagagccttggaagtcaacactgtcacatgtcagctgaactgttccgaccatggccactgtgactcgttcaccaaacgctgtatctgtgaccctttttggatggagaatttcatcaaggtgcagctgagggatggagacagcaactgtgagtggagcgtgttatatgttatcattgctacctttgtcattgttgttgccttgggaatcctgtcttggactgtgatctgttgttgtaagaggcaaaaaggaaaacccaagaggaaaagcaagtacaagatcctggatgccacggatcaggaaagcctggagctgaagccaacctcccgagcaggcatcaaacagaaaggccttttgctaagtagcagcctgatgcactccgagtcagagctggacagcgatgatgccatctttacatggccagaccgagagaagggcaaactcctgcatggtcagaatggctctgtacccaacgggcagacccctctgaaggccaggagcccgcgggaggagatcctgtagccacctggtctgtctcctcagggcagggcccagcacactgcccggccagtcctcctacctcccgagtctgcgggcagctgctgtcccagcatctgctggtcatttcgccctgacagtcccaaccagaacccctgggacttgaatccagagacgtcctccaggaacccctcaacgaagctgtgaatgaagaggtttcctctttaaacctgtctggtgggcccccagatatcctcacctcagggcctcctttttttgcaaactcctcccctcccccgagggcagacccagccagctgctaagctctgcagctccccagtggacagtgtcattgtgcccagagtgctgcaaggtgaggcctgctgtgctgcccgcacacctgagtgcaaaaccaagcactgtgggcatggtgtttccctctctggggtagagtacgccctctcgctgggcaaagaggaagtggcacccctcccctcaccacagatgctgagatggtagcatagaaatgatggccgggcgcggtggctcacgcctgtaatcccagcactttgggaggccgaggcgggcggatcatgaggtcaggagatcaagaccaccctggctaacacggtgaaaccccatctctact

SEQ ID NO: 132 - DNA, 1833 bp, human
ggcacgagtgggagtacaggactcgcctcctcagggttccctgtgctgccacttttcagccatggccacaagtgaacagagtatctgccaagcccgggcttccgtgatggtctacgatgacaccagtaagaaatgggtaccaatcaaacctggccagcagggattcagccggatcaacatctaccacaacactgccagcaacaccttcagagtcgttggagtcaagttgcaggatcagcaggttgtgatcaattattcaatcgtgaaagggctgaagtacaatcaggccacgccaaccttccaccagtggcgagatgcccgccaggtctacggcttaaactttgcaagtaaagaagaggcaaccacgttctccaatgcaatgctgtttgccctgaacatcatgaattcccaagaaggaggcccctccagccagcgtcaggtgcagaatggcccctctcctgatgagatggacatccagagaagacaagtgatggagcagcaccagcagcagcgtcaggaatctctagaaagaagaacctcggccacagggcccatcctcccaccaggacatccttcatctgcagccagcgcccccgtctcatgtagtgggcctccaccgccccccccacccccagtcccacctccacccactggggctaccccacctcccccacccccactgccagccggaggagcccaggggtccagccacgacgagagctccatgtcaggactggccgctgccatagctggggccaagctgagaagagtccaacggccagaagacgcatctggaggctccagtcccagtgggacctcaaagtccgatgccaaccgggcaagcagcgggggtggcggaggaggcctcatggaggaaatgaacaaactgctggccaagaggagaaaagcagcctcccagtcagacaagccagccgagaagaaggaagatgaaagccaaatggaagatcctagtacctccccctctccggggacccgagcagccagccagccacctaactcctcagaggctggccggaagccctgggagcggagcaactcggtggagaagcctgtgtcctcgattctgtccagaaccccgtctgtggcaaagagccccgaagctaagagcccccttcagtcgcagcctcactctaggatgaagcctgctgggagcgtgaatgacatggccctggatgccttcgacttggaccggatgaagcaggagatcctagaggaggtggtgagagagctccacaaggtgaaggaggagatcatcgacgccatcaggcaggagctgagtgggatcagcaccacgtaaggggccggcctcgctgcgctgattcgtcgagcccatccggcgacagaggacagccagaagcccagccagccccagactccagtgcaccagagcacgcacaggagcctgggcgcgctgctgtgaaacgtcctgacctgtgatcacacatgacagtgaggaaaccaagtgcaactcctgggtttttttagattctgcctgacacggaacaccaggtctgctcgtcttttttgtgttttatatttgcttatttaaggtacatttctttgggtttctagagacgcccctaagtcacctgcttcattagacggtttccaggttttctcccaggtgacgctgttagcgcctcagctggcggtgacagccggcccagcgtggcgccaccacacaccgcagagctgtccaggcacagctccgtccccagcgctcatggtgttgaaactgtctgtcatgcaccacggtgtctgtgtccacacagtaataaacggtttactgtccgcaaaaaaaaaaaaaaaaaa

SEQ ID NO: 133 - DNA, 2415 bp, human
cggcgccgcgagcttctcctctcctcacgaccgaggcagagcagtcattatggcgaaccttggctgctggatgctggttctctttgtggccacatggagtgacctgggcctctgcaagaagcgcccgaagcctggaggatggaacactgggggcagccgatacccggggcagggcagccctggaggcaaccgctacccacctcagggcggtggtggctgggggcagcctcatggtggtggctgggggcagcctcatggtggtggctgggggcagccccatggtggtggctggggacagcctcatggtggtggctggggtcaaggaggtggcacccacagtcagtggaacaagccgagtaagccaaaaaccaacatgaagcacatggctggtgctgcagcagctggggcagtggtggggggccttggcggctacatgctgggaagtgccatgagcaggcccatcatacatttcggcagtgactatgaggaccgttactatcgtgaaaacatgcaccgttaccccaaccaagtgtactacaggcccatggatgagtacagcaaccagaacaactttgtgcacgactgcgtcaatatcacaatcaagcagcacacggtcaccacaaccaccaagggggagaacttcaccgagaccgacgttaagatgatggagcgcgtggttgagcagatgtgtatcacccagtacgagagggaatctcaggcctattaccagagaggatcgagcatggtcctcttctcctctccacctgtgatcctcctgatctctttcctcatcttcctgatagtgggatgaggaaggtcttcctgttttcaccatctttctaatctttttccagcttgagggaggcggtatccacctgcagcccttttagtggtggtgtctcactctttcttctctctttgtcccggataggctaatcaatacccttggcactgatgggcactggaaaacatagagtagacctgagatgctggtcaagccccctttgattgagttcatcatgagccgttgctaatgccaggccagtaaaagtataacagcaaataaccattggttaatctggacttatttttggacttagtgcaacaggttgaggctaaaacaaatctcagaacagtctgaaatacctttgcctggatacctctggctccttcagcagctagagctcagtatactaatgccctatcttagtagagatttcatagctatttagagatattttccattttaagaaaacccgacaacatttctgccaggtttgttaggaggccacatgatacttattcaaaaaaatcctagagattcttagctcttgggatgcaggctcagcccgctggagcatgagctctgtgtgtaccgagaactggggtgatgttttacttttcacagtatgggctacacagcagctgttcaacaagagtaaatattgtcacaacactgaacctctggctagaggacatattcacagtgaacataactgtaacatatatgaaaggcttctgggacttgaaatcaaatgtttgggaatggtgcccttggaggcaacctcccattttagatgtttaaaggaccctatatgtggcattcctttctttaaactataggtaattaaggcagctgaaaagtaaattgccttctagacactgaaggcaaatctcctttgtccatttacctggaaaccagaatgattttgacatacaggagagctgcagttgtgaaagcaccatcatcatagaggatgatgtaattaaaaaatggtcagtgtgcaaagaaaagaactgcttgcatttctttatttctgtctcataattgtcaaaaaccagaattaggtcaagttcatagtttctgtaattggcttttgaatcaaagaatagggagacaatctaaaaaatatcttaggttggagatgacagaaatatgattgatttgaagtggaaaaagaaattctgttaatgttaattaaagtaaaattattccctgaattgtttgatattgtcacctagcagatatgtattacttttctgcaatgttattattggcttgcactttgtgagtatctatgtaaaaatatatatgtatataaaatatatattgcataggacagacttaggagttttgtttagagcagttaacatctgaagtgtctaatgcattaacttttgtaaggtactgaatacttaatatgtgggaaacccttttgcgtggtccttaggcttacaatgtgcactgaatcgtttcatgtaagaatccaaagtggacaccattaacaggtctttgaaatatgcatgtactttatattttctatatttgtaactttgcatgttcttgttttgttatataaaaaaattgtaaatgtttaatatctgactgaaattaaacgagcgaagatgagcacc

SEQ ID NO: 134 - DNA, 1740 bp, human
ggccggtagctgttgctgttgggggaccccctcattcctgccgctgccgtccctgctgcctcatggcggccatcggagttcacctgggctgcacctcagcctgtgtggccgtctataaggatggccgggctggtgtggttgcaaatgatgccggtgaccgagttactccagctgttgttgcttactcagaaaatgaagagattgttggattggcagcaaaacaaagtagaataagaaatatttcaaatacagtaatgaaagtaaagcagatcctgggcagaagctccagtgatccacaagctcagaaatacatcgcggaaagtaaatgtttagtcattgaaaaaaatgggaaattacgatatgaaatagatactggagaagaaacaaaatttgttaacccagaagatgttgccagactgatatttagtaaaatgaaagaaacggcacattctgtattgggctcagatgcaaatgatgtagttattactgtcccgtttgattttggagaaaagcaaaaaaatgcccttggagaagcagctagagctgctggatttaatgttttgcgattaattcacgaaccgtctgcagctcttcttgcttatggaattggacaagactcccctactggaaaaagcaatattttggtgtttaagcttggaggaacatccttatctctcagcgtcatggaagttaacagtggaatatatcgggttctttcaacaaacactgatgataacatcggtggtgcacatttcacagaaaccttagcacagtatctagcttctgagttccaaagatccttcaaacatgatgtgagaggaaatgcgcgagccatgatgaaattaacgaacagtgctgaagtagcgaaacattctttgtcaaccttgggaagtgccaactgttttcctgactcattatatgaagggcaagattttgattgcaatgtgtccagagcaagatttgaacttctttgttctccactttttaataagtgtttagaagcaatcagaggactcttagatcaaaatggatttacagcagatgatatcaacaaggttgtcctttgtggagggtcttctcgaatcccaaagctacagcaactgattaaagatcttttcccagctgttgagcttctcaattctatccctcctgatgaagtgatccctattggtgcagctatagaagcaggaattcttattgggaaagaaaacctgttggtggaagactctcttatgatagagtgttcagccagagatattttagttaagggtgtggacgaatcaggagccagtagattcacagtgctgtttccatcagggactcctttgccagctcgaagacaacacacattgcaagcccctggaagcatatcttcagtgtgccttgaactctatgagtctgatgggaagaactctgccaaagaggaaaccaagtttgcacaggttgtactccaggatttagataaaaaagaaaatggattacgtgatatattagctgttcttactatgaaaagggatggatctttacatgtgacatgcacagatcaagaaactggaaaatgtgaagcaatctctattgagatagcatcttagtgttttagagaaatcaagaatttttaaaaacaagaatatcaacatttggttttgtgtataagtggtgtttgtattaaaatactttttcaatgaactgtataaactatgttttattaaactacaatatatcagtaaaaaaaaaaaaaaa

SEQ ID NO: 135 - DNA, 1120 bp, human
tccgttttaatgaagtgagaaatgcatctcaatgggataactgcaggtcagggctctggatcaggatgatatcaagtgatctcacactgaaccaatataatttccatgtggaaccaaagactcactgggagttttatgtggcctctgcagttttctcttggatacgtgtataattttcagtgagattttgaaaggcatcccaggtcagaataccgtgtgctgtagtgcgaccgtcctgatcattgctccttattctcccttgttccagtgaacaaggggagaagaattgccttcagctccacgtcgttactgaaaatggcccccagcgctgaggagaggaccaccatacatgagatgtttctcagcacactggatccaaagactataagttttcggagtcgagttttaccctctaatgcagtgtggatggagaattcaaaactgaagagtttggaaatttgccaccctcaggagcggaacattttcaatcggatctttggtggtttccttatgaggaaggcatatgaacttgcgtgggctactgcttgtagctttggtggttctcgaccgtttgtggtagcagtagatgacatcatgtttcagaaacctgttgaggttggctcattgctctttctttcttcacaggtatgctttactcagaataattatattcaagtcagagtacacagtgaagtggcctccctgcaggagaagcagcatacaaccaccaatgtctttcatttcacgttcatgtcggaaaaagaagtgccattggttttcccaaaaacatatggagagtccatgttgtacttagatgggcagcggcatttcaactccatgagtggcccagcgaccttgagaaaggactaccttgtggagccctaagaacaccacatttgttgaaaactagcactctacccacagtgacgtggtatctgatgaagacctgatcgagtgtattgattttagtattgcttcgtgtcctccacacaggaggaggatgtattcagcctttaggatgatcagaaaagcagaaagagagagtggccggatggggctgaggggagaaagaattattaaacaataaatactttcaagacaaaaaaaaaaaaaaaaaacc

SEQ ID NO: 136 - DNA, 575 bp, human
  misc_feature (546)..(546): n is a, c, g, or t
  misc_feature (561)..(561): n is a, c, g, or t
  misc_feature (575)..(575): n is a, c, g, or t
gactgaaattaaagtgtatttatttgcagcaatcctttaacaatgatcaaattttgacaacaagcaacagcaattactgcttaagtgttgcctctagataggagcggcagatagcaggaaactgtattatctccaaaacaaactgcaagccccccacccccccgaacgtctgtaatcaaatcgccatctccccaaagtctgattggcagggcagatcaccctaagataatgaatttattacatttcctgggttatttacaaaagggggagggccaatccggattgtcccctaggtttaactgtaaattaacaagaaaaaatggtttaaaaagaaaccaccctagaccaaaatgttctgctcctctcgccttccttcttgttattgctttaaatctttttcaaaaataattgttctacaaacatattttctaaaatagtttcccaaagattaaatatccctttccaacccgcagtatatttttaaaaaagcaatccttctatgtaatcatgaaggattgtaaatgggggagaaatattttccttccntttaaaaactgggtnatttttccttttan

SEQ ID NO: 137 - DNA, 2767 bp, human
gcggagggtgcgtgcgggccgcggcagccgaacaaaggagcaggggcgccgccgcagggacccgccacccacctcccggggccgcgcagcggcctctcgtctactgccaccatgaccgccaacggcacagccgaggcggtgcagatccagttcggcctcatcaactgcggcaacaagtacctgacggccgaggcgttcgggttcaaggtgaacgcgtccgccagcagcctgaagaagaagcagatctggacgctggagcagccccctgacgaggcgggcagcgcggccgtgtgcctgcgcagccacctgggccgctacctggcggcggacaaggacggcaacgtgacctgcgagcgcgaggtgcccggtcccgactgccgtttcctcatcgtggcgcacgacgacggtcgctggtcgctgcagtccgaggcgcaccggcgctacttcggcggcaccgaggaccgcctgtcctgcttcgcgcagacggtgtcccccgccgagaagtggagcgtgcacatcgccatgcaccctcaggtcaacatctacagtgtcacccgtaagcgctacgcgcacctgagcgcgcggccggccgacgagatcgccgtggaccgcgacgtgccctggggcgtcgactcgctcatcaccctcgccttccaggaccagcgctacagcgtgcagaccgccgaccaccgcttcctgcgccacgacgggcgcctggtggcgcgccccgagccggccactggctacacgctggagttccgctccggcaaggtggccttccgcgactgcgagggccgttacctggcgccgtcggggcccagcggcacgctcaaggcgggcaaggccaccaaggtgggcaaggacgagctctttgctctggagcagagctgcgcccaggtcgtgctgcaggcggccaacgagaggaacgtgtccacgcgccagggtatggacctgtctgccaatcaggacgaggagaccgaccaggagaccttccagctggagatcgaccgcgacaccaaaaagtgtgccttccgtacccacacgggcaagtactggacgctgacggccaccgggggcgtgcagtccaccgcctccagcaagaatgccagctgctactttgacatcgagtggcgtgaccggcgcatcacactgagggcgtccaatggcaagtttgtgacctccaagaagaatgggcagctggccgcctcggtggagacagcaggggactcagagctcttcctcatgaagctcatcaaccgccccatcatcgtgttccgcggggagcatggcttcatcggctgccgcaaggtcacgggcaccctggacgccaaccgctccagctatgacgtcttccagctggagttcaacgatggcgcctacaacatcaaagactccacaggcaaatactggacggtgggcagtgactccgcggtcaccagcagcggcgacactcctgtggacttcttcttcgagttctgcgactataacaaggtggccatcaaggtgggcgggcgctacctgaagggcgaccacgcaggcgtcctgaaggcctcggcggaaaccgtggaccccgcctcgctctgggagtactagggccggcccgtccttccccgcccctgcccacatggcggctcctgccaaccctccctgctaaccccttctccgccaggtgggctccagggcgggaggcaagcccccttgcctttcaaactggaaaccccagagaaaacggtgcccccacctgtcgcccctatggactccccactctcccctccgcccgggttccctactcccctcgggtcagcggctgcggcctggccctgggagggatttcagatgcccctgccctcttgtctgccacggggcgagtctggcacctctttcttctgacctcagacggctctgagccttatttctctggaagcggctaagggacggttgggggctgggagccctgggcgtgtagtgtaactggaatcttttgcctctcccagccacctcctcccagccccccaggagagctgggcacatgtcccaagcctgtcagtggccctccctggtgcactgtccccgaaacccctgcttgggaagggaagctgtcgggagggctaggactgacccttgtggtgtttttttgggtggtggctggaaacagcccctctcccacgtgggagaggctcagcctggctcccttccctggagcggcagggcgtgacggccacagggtctgcccgctgcacgttctgccaaggtggtggtggcgggcgggtaggggtgtgggggccgtcttcctcctgtctctttcctttcaccctagcctgactggaagcagaaaatgaccaaatcagtattttttttaatgaaatattattgctggaggcgtcccaggcaagcctggctgtagtagcgagtgatctggcggggggcgtctcagcaccctccccagggggtgcatctcagccccctctttccgtccttcccgtccagccccagccctgggcctgggctgccgacacctgggccagagcccctgctgtgattggtgctccctgggcctcccgggtggatgaagccaggcgtcgccccctccgggagccctggggtgagccgccggggcccccctgctgccagcctcccccgtccccaacatgcatctcactctgggtgtcttggtcttttattttttgtaagtgtcatttgtataactctaaacgcccatgatagtagcttcaaactggaaatagcgaaataaaataactcagtctgc

SEQ ID NO: 138 - DNA, 2851 bp, human
agcatctcaggccatcatcctgaaacttggcagccttcgtggagtataaggacagcattattagccatcattgggtttactgccaacaaaaggagagggagccataggttctctagattacactcctgaggaaagaagagcacttgccaaaaaatcacaagatttctgttgtgaaggatgtggctctgccatgaaggatgtcctgttgcctttaaaatctggaagcgattcaagccaagctgaccaagaagccaaagaactggctaggcaaataagctttaaggcagaagtcaattcatctggaaagactatctctgagtcagacttaaaccactctttttcactaactgatttacaagatgatatacctacaacattccagggtgctacggccagtacatcgtacggactccagaattcctcagcagcatcctttcatcaacctacccaacctgtagctaagaatacctccatgagccctcgacagcgccgggcccagcagcagagtcagagaaggttgtctacttcaccagatgtaatccagggccaccagccaagagacaaccacactgatcatggtgggtcagctgtactgattgtcatcctgactttggcattggcagctcttatattccgacgaatatatctggcaaacgaatacatatttgactttgagttataatatggttttgtgacttatgagctgtgactcaactgcttcattaaacattctgcattgggtataatctaagaattgtttacaaaaagattattttgtatttacccttcattcctttttttgatccttgtaagtttagtataaatatatctagacattcagactgtgtctagcagttacgtcctgcttaaagggactagaagtcaaagttccttgtctcactatttgatctgctttgcagggaaataacttgttttttctcatgtttcatcttctttttatgtaaatttgtaatactttcctatattgccctttgaaatttttggataaaagatgatgttttaagttccaatgagtattactagttactcaataccacttattgagtactctgtttctacgtatgtagaatgtatagggatagaagagttgaaaagggaaagcaaaacttcttaagtggcttccttaaaatgtcattcataggagatgtactggaattgctcattctgtgactttatttgtgtcctaaacattcttcagtgaaaataattttatttcagtcaaacatttatgaggaaatgagatcacatctttgtcactggatgctacttgaagagggagtactttgtaaccactttgatatgctgttatcaccaccccctgccctctgctgccataatcacacaaatttaaaaagaaagaaaacagtcttccatagatttttaaggaagaaagggcccaagtcaggagatcgcttggttttcttccagaagttaaatggggggatctgaagatttgaatgttcggtctgctttgaaatgtatgtcttttgggaatgtattatatgcctagctttataatcaggtataaaattttaattattcccaggaatatgcataatattgaatatttcatgtcctattttaatagaaaacctcagggcccaagtaaccagtgatagaagttagaaaaacccctttacttagaattgtccacctagtcagagcccaagaaagaattttcagtggaaaaatcaatatataacttagtgctagctagcgccacagactctagtagataatattatcatcataatggctggtgaaaccatataatcacagaaaaacattgccttcagcatgttcagttcgcagcactgagggcactcttgagggtgttgttaatgaagatttaatttttaaatacaggtggttccaagctttcaaataggttatgctccaaaagtgttatttgtaagttaatttttttacaagtcaaacaatgttggaagtggtatttaggttctagatcggtccacgaaagttagcccatatgtatatcttgaatagtataggggagggtattcataaagtccttatgtggttttaactaagtgaaattatggacaagagaaataattgtaaaatcgtcttaaaggcaaatttaatttttacccctgtttatgggacattcgttctattaactgtcagacacaatttctgttttcatctgagagccaggtttcctttatttctacatctaaaataagaacatattgtacactattatataatacagaattgtcttacactttaataaattcgcattttaaaggtgtttacaggattattttttatatctgtagctgaatttgttaaagtctaaaaagctcaaggactttatgaagatctcattatatgaggaaaatcataggttaccattttataactctattgccataagaaaatacactctaaaatcttgatttgaaacatattagaaaccttgattcagtgctcagtggtctcctagtaagaagtcaccgacggtagcgtcatatgagaagaaagaaatccccaccacctcaacctctgctgagattgtgtgctaggaacagccttccctccgtttcccctcagtcaaacttgagccagcctctggatcgatgtgatcttattgcatgtttccatggggtgtacctatactttaagccaatcctgctgcattcactgctaagttaaataaaaagccaagaagaaaaaaaaaattttgcactgtgcagatcctttgctatctgacttgcatctcttcccccacctgtcagctagccacctgcttgtttgtgttgggatattttttagcacctgaagcaccatctgaaaggggcaccat

SEQ ID NO: 139 - DNA, 2157 bp, human
gatcacaaatccaaacccttcagaagaaggtagtaaacttggagactgctctgagttacatgaccaaagagtttgagagtgaagttttaaaactgcagcaacacgcaatgatagagaaccaagcaggtcaggtagaaattgacaagctgcagcaccttcttcagatgaaggacagggaaatgaatcgtgtgaagaagctggccaagaacatactggatgagagaacagaagtggaaagattctttttagatgctctgcaccaagtgaagcaacagatcctaattagcaggaagcattataagcagatagcacaagctgctttcaatttaaaaatgagagcagcatgtacaggaagaacagaatatcccaaaatcagaacatttgatggcagagagcacagcaccaatagtgtgaatcaggatcttctggaggccgaaaaatggacacatattgaaggaaatgtggatattggagatttgacctgggagcagaaggaaaaagtattgcgattgctctttgcaaaaatgaatggctgtccttctaggaaatacaaccagagttctaggcctccagttccagactatgttgtttctgacagtggggaaacaaaggaatttggggatgaaagtaagcttcaagataaaatcttcatcacccagcaaattgcaatatcagactcttctggtgaagtggtgctacccactattccaaaagaacctcaggagtctgacacaggaaccttctgagaagcactgattatgacctcacagatgctgctggcagtcccttccttgcagaatccttgctcctgaatatctttaagaaaatttcttaaaggaaaagacaaaaaatttaactcaaaagttacctgtttgccatagaaattggtgtctcccctgaaggaggatcgagagccggtgaatgagaacattggcaaaggcactggaatggggacattcactcccacctaaaacagaacaaatccgtgtcatatcctaaggacaaaggaactctccatttagaaacacaaaggcatcagagaccagttttaaatacccaccttctaccctatcctctaccccatgaactttcattcctgaggaagaaatggggcaatgtgggaggtcatgggggcaatcttaaaccaatgactcaccattatttactgtttcctcttaggaaatagtaaatggatataagaatctcttaaaaattctgttcacgaacctgtccaacatccaccaagtgggcatatttccgagcagtggctccattggtggtgaagatggcagttccatttccatatgggttgttatttacaatctggatggcttcatccaatgtttctgtctccagaaccacaagaactggaccaaaaatctcctctttgtaacaggtcatatttggctgccaggagtgatgcatccagaaaagaagtcagctttttggattctgagtattttatgcttatttggtactttcacttactacacatcatttacgtggacaactttcatattactaatctcttttcatttcaaatcacctatttaaaaaaaaagtcctctctcaagtgtattccgtcttccaagttaccaatcatataaacaacttggaattcctatcaacaataaccacacttcctttaagggactgtatctttagttcatgacccatcatcagctgcctttttaatacctgaacgactagtttcatccaattgttatcaaaaagttacatgaaaatttattttttataaatccaatctatagtaaatataccaggataatttttctctttacagaaaccccatgctgttttctgtaacataaataatccattcttattcactcctttgcctcccaaatatgtctgtatgtttatattttgatatcaggtcgcagacactcaaaacatccttcaccatgcaattaatgtttgttgctgataaacggatttttctgtatggttctgtggcaagagatttcataatttctactgcacttacattcaacacttgatgattcactattatagtaaggatatatgaatttcaaaaaatgcctcataacctcaatttttaagtcatgttagctgagagactttcaaagttttgataaataaaaattgccaagtcaaaaaaaaaaaaaaaaaaaa

SEQ ID NO: 140 - DNA, 6996 bp, human
atggaccaaggcccttggcggtgcgttgcgcacccccggggcgccgcgactgaagtagcaatggacgcgctggagtcgttgttggacgaagtcgctctggaggggctcgatggcctgtgtctgccagcgctgtggagccggctggagacgcgagtgccgcccttcccgctgcctttggaaccctgcacgcaggagtttctctggcgggccctcgccacgcacccgggcatcagcttctatgaggagcctcgggagcgacccgacctacagctccaggaccggtatgaagaaattgatttggaaactggaattttggagtctaggagggacccggtggctttggaggatgtctaccccattcatatgatcttagagaataaggatggcatccagggctcatgccgctactttaaggagaggaaaaacattaccaatgacatcagaaccaagtccttgcagcctcgctgtacaatggtggaaccctttgacaggtgggggaagaaactgatcatcggttccctcccagcccatgcggtacaggcccttgatagcccaggagggggatcccgacctgaagctgcccgacttctcctactgcatcctggaacggctaggccggtccaggtgcaaggggagctccagcgagaccttcacaccactgctttcaaggttgatgctgggaagctgcactatcacagaaaaattttgaacaaaaacgggctgattacaatgcagtcccatgtgatccgattacccactggagcccagcaacactcaatcctcctcctactgaaccggtttcatgtggacaggaggagcaaatacgacatcctcatggagaagctttcggtcatgctgagcacacggactaaccacatagagacgctgggaaagctgagggaagagctggggctgtgcgaaaggacgtttaagcgtctgtaccagtatatgctgaacgccgggctagccaaggtggtgtctcttcgcttgcaagagatccaccctgaatgtggaccttgtaagacaaagaaagggaccgacgtcatggttcggtgcctcaagctgctgaaggaatttaaacggaatgaccatgatgatgacgaggacgaggaggtcatctccaagacagtgcctccagtggacattgtgttcgagcgggatatgctcacacagacctacgacctcattgagcgcagaggcacgaaaggaatttcccaagctgaaatccgagtggctatgaatgtgggaaaactagaagcaagaatgctgtgccgacttcttcaaagattcaaagttgtcaagggattcatggaagacgaaggtcggcagcgaaccaccaagtacatttcctgcgtgtttgcagaggagagcgacctaagccggcagtaccaaagagagaaggcccgcagcgagctcttgaccaccgtgagcctggcgtctatgcaggaggagtcgcttctgcctgaaggcgaggacaccttcctctctgagtcggacagtgaggaggagaggagcagcagcaagcggagaggcagagggtcccagaaagacacaagagcctctgcaaacctccggcccaagacccagcctcatcactccaccccaaccaagggtgggtggaaagttgtaaacctacacccattgaaaaagcagccgccctccttcccaggagctgctgaagagagagcctgccagagccttgccagcagggacagcctcttagataccagcagcgtctcagaacccaacgtgtcctttgtctcccactgtgcggacagcaacagtggtgacatagctgtgatcgaggaggtccggatggaaaacccaaaggagagtagcagttccctgaagactgggaggcacagctcaggccaagacaaaccacacgaaacttaccgactgctgaaacgcaggaatctgatcatagaagctgtcaccaatcttcgcttaatcgagagtttattcacgattcagaagatgatcatggatcaggagaagcaggaaggcgtgtccaccaagtgctgcaagaagtccattgtccgcttggtgcggaacctgtctgaggaaggtctcttgcgattgtatcggaccactgtcattcaagatggcatcaagaagaaggtggatctggtggtgcacccgtccatggaccagaacgaccctctagtgagaagtgccatcgagcaggtccgcttccggatctccaattcaagcacagccaacagggttaaaacttcccagcctccagtgccccaaggggaggcagaagaagacagtcaaggaaaagagggcccaagtggatcaggggactctcagctgagtgcttcctctagatcagaaagtggacggatgaaaaaaagtgataataaaatgggcataaccccgcttagaaattatcaccccattgtagttcccggactggggcgttctctaggatttctgcccaaaatgcctcgcctgcgggtggtccacatgtttctgtggtacctcatctacgggcaccctgccagcaacaccgtggagaagccaagcttcatcagtgaacggagaacgataaagcaggagtcaggcagggcaggcgtccggccgtcctcctctggaagtgcctgggaggcctgctctgaagccccatctaaaggcagccaagatggtgtcacctgggaggctgaagtggagcttgccacggagacagtgtatgtcgacgatgcctcgtggatgcgctacatccccccaatcccagtccacagggacttcggctttggctgggctctcgtcagcgacatcctcctctgccttcccctctccatcttcatccagattgtgcaagtcagctacaaggtggacaacctggaggaatttctgaacgacccgctgaagaagcacacgctgatccgctttctccccaggcccattcggcagcagcttctgtacaagaggcgttacattttttcggtggtggagaaccttcagaggctgtgctacatgggggtgctacagtttggtcccacggaaaagtttcaggataaagatcaggtctttatcttcttgaagaagaatgcagtcattgttgacactaccatctgcgacccacattacaacctgggccgcaggaggcggcccttcgagaggcgcctctatgtcctgaactcaatgcaggatgtggaaaactactggtttgacctgcagtgcgtctgcctcaacaccccactaggcgtggtgcgctgcccgcgcgtcaggaagaacagcagcacagaccagggcagcgacgaggagggcagcctgcagaaggagcaggagagcgccatggacaagcacaacctggagcgcaagtgcgccatgctggagtacaccactggaagccgtgaggtggtggatgaaggcttgatccctggagatgggctgggtgccgcagggctcgattccagcttctacggacacctcaagcgcaactggatctggaccagctacatcatcaaccaggccaaaaaggagaacactgccgcagagaatggactcacagtgaggctccagacatttctgtccaagcgcccaatgcccctcagtgccagaggcaacagcaggttgaatatttggggggaagcaagagtaggctccgagctctgtgctggctgggaagagcagtttgaggtggaccgagagccctcgctggaccgaaaccggagagtgaggggtgggaaaagccagaagcggaagcggctgaagaaggaccctgggaagaagatcaagagaaagaagaaaggagagttcccaggagaaaaaagcaaaaggctgcgctaccatgatgaagccgaccagagtgccctgcatcggatgacgcggcttcgtgtcacctggtctatgcaggaggatgggctgcttgtgctgtgccgcattgccagcaatgtcctcaacaccaaggtgaagggtccatttgtcacctggcaggtggtacgggacattttgcatgccacgtttgaagagtctttggataaaacatctcattcccttggacgaagagctcgctacatagtcaaaaacccacaggcctatctcaactataaagtgtgcctggccgaggtgtaccaggataaagcacttgttggagatttcatgaatcgaagaggtgactatgatgacccaaaggtttgtgccaacgagtttaaagaatttgtggagaagcttaaagaaaagttcagttcagccctaaggaattctaaccttgaaatcccagacacactccaggagctgttcgccaggtaccgagttttggcaattggggatgaaaaagatcaaaccaggaaagaggatgaacttaacagcgtggatgacatccactttctggtgcttcagaacctgatccagagcacgctggccctctcagacagtcagatgaagtcctaccagtcattccagactttccgcctctatcgggagtacaaggaccacgttcttgtgaaggccttcatggagtgccagaagaggagcttggtcaaccggcgccgggtcaaccacacgctgggccccaagaagaaccgggccctccccttcgtgccaatgtcctaccagctatcccagacctactacaggatttttacgtggcgatttccaagcaccatctgcacggagtcattccagtttttggacagaatgcgggctgccggcaagttggaccagcctgatcgtttctctttcaaagaccaggataataacgagcccacaaacgacatggtggccttttcactggacggccctggaggaaattgtgtggccgtcctgaccctcttctctctgggcctcatttctgtggatgtcaggatcccggagcagatcatcgtggtagacagctcaatggtggagaatgaggtcatcaaaagcttggggaaggacggcagcctggaggatgacgaggatgaagaggatgacttggacgaaggtgtagggggcaagcgccggagcatggaggtgaaacctgcgcaagcctcccacaccaactacctgctgatgaggggctactactcccccggcatcgtcagcacccgcaacctcaaccccaacgacagcattgtggtcaactcctgccagatgaagttccagctccgctgcacccctgtgcccgcccggctcaggcccgctgccgctcctctggaagagctaacaatgggaacctcctgcctccctgatacgttcaccaagctgataaacccccaggaaaacacctgcagcttggaggagtttgtcctccagctggagctgtctgggtatagtcccgaagacctgactgctgccttggagatcttggaagccattatagccacgggttgttttgggattgacaaggaggagctgcgcagacggttctcggccttggagaaggcaggtggtgggcgcaccaggacattcgcagattgcatccaggccctcctggagcagcatcaggtgctggaggtcggtggcaacactgcgcgcctggtagccatgggctctgcctggccttggctcctgcactccgtgcggctgaaagacagagaagacgccgacatccagagagaagacccccaggccagacccctggaggggtcttccagtgaggacagcccccccgaggggcaggcacctccttctcacagcccccggggcaccaagaggcgcgccagctgggccagtgagaatggggagaccgacgccgagggcacccagatgacccctgccaagaggccagcgctccaggactcaaatttggcccccagccttgggcccggagctgaagatggggcagaagcccaggccccatctccacccccagctcttgaagacaccgctgcagcgggagcagcacaggaagaccaagagggtgtcggtgagttcagttccccaggccaagagcagctgagcggccaggcgcagcctccagagggctctgaagaccccagagggttcacagagagtttcggagctgccaacatctcccaggcagcacgggaaagggactgtgagagtgtctgcttcatcggccggccgtggcgtgtcgtggatggccacctgaaccttcctgtatgcaagggtatgatggaggccatgctgtaccacatcatgaccaggcctggcatccccgagagctccctgctgcgccactaccagggggtcctgcagcccgtcgccgtgctggagttgctccagggcctggagtccctcggctgcatccggaagcgctggctgagaaagccaaggcctgtctcgctcttctctacacccgtggtggaagaggtggaagtgccctccagcctggacgagagccccatggctttctatgagcccaccttggactgtaccctccggctgggccgtgtgttcccccacgaggtcaactggaacaagtggatccacctctaggacccctgtgggcgtcccctccctcccagccaccgcctgccacaccactcctgcctggtgctcggcagaccccactgtgccctggccttgggtctgccgagcctcctgcagcaggggacgggtgctttggccagagtcacagactgacacgtttcccactgtactggaactctggaaagaggggctccccgacctgcccatcccccaggctcttctgggccttccccttgggaactggcctcatcacactgggagttggtgcttcttgtctctgggtctccagagtttgccccgcctgtgcacacctcacattccagactctagccatctcggcaggatctcctggctccttgagtgcccaggtgccaccaagaggaagggccttgtgggatacaccttgcagaatagggatcggtgtgccccgctgcgaggggccccccatgggggctgtggcccctccgcaggcaggacatcccaacccctggctgggactgaaccacccagagcggagcggctcccttttcagccttgtgagtcacctggcaggccccagctgggctggctgtccgtgtccctcagcctggctggtgattccttgcaggaggg

SEQ ID NO: 141 - DNA, 1720 bp, human
acagctatggggtcttccagctcacacatgacagagtttccacgaaaacgcaaaggaagtgattcagacccatcccaagaagctcatagccaaactgaaaagcggaggagagataaaatgaataacctgattgaagaactgtctgcaatgatccctcagtgcaaccccatggcgcgtaaactggacaaacttacagttttaagaatggctgttcaacacttgagatctttaaaaggcttgacaaattcttatgtgggaagtaattatagaccatcatttcttcaggataatgagctcagacatttaatccttaagactgcagaaggcttcttatttgtggttggatgtgaaagaggaaaaattctcttcgtttctaagtcagtctccaaaatacttaattatgatcaggctagtttgactggacaaagcttatttgacttcttacatccaaaagatgttgccaaagtaaaggaacaactttcttcttttgatatttcaccaagagaaaagctaatagatgccaaaactggtttgcaagttcacagtaatctccacgctggaaggacacgtgtgtattctggctcaagacgatcttttttctgtcggataaagagttgtaaaatctctgtcaaagaagagcatggatgcttacccaactcaaagaagaaagagcacagaaaattctatactatccattgcactggttacttgagaagctggcgtccaaatattgttggaatggaagaagaaaggaacagtaagaaagacaacagtaattttacctgccttgtggccattggaagattacagccatatattgttccacagaacagtggagagattaatgtgaaaccaactgaatttataacccggtttgcagtgaatggaaaatttgtctatgtagatcaaagggcaacagcgattttaggatatctgcctcaggaacttttgggaacttcttgttatgaatattttcatcaagatgaccacaataatttgactgacaagcacaaagcagttctacagagtaaggagaaaatacttacagattcctacaaattcagagcaaaagatggctcttttgtaactttaaaaagccaatggtttagtttcacaaatccttggacaaaagaactggaatatattgtatctgtcaacactttagttttgggacatagtgagcctggagaagcatcatttttaccttgtagctctcaatcatcagaagaatcctctagacagtcctgtatgagtgtacctggaatgtctactggaacagtacttggtgctggtagtattggaacagatattgcaaatgaaattctggatatacagaggttacagtcttcttcataccttgatgattcgagtccaacaggtttaatgaaagatactcatactgtaaactgcaggagtatgtcaaataaggagttgtttccaccaagtccttctgaaatgggggagctagaggctaccaggcaaaaccagagtactgttgctgtccacagccatgagccactcctcagtgatggtgcacagttggatttcgatgccctatgtgacaatgatgacacagccatggctgcatttatgaattacttagaagcagaggggggcctgggagaccctggggacttcagtgacatccagtggaccctctagcctttgatttttaactccaaaaatgagaaacattttaaagcatttcatttacgaaaaa

SEQ ID NO: 142 - DNA, 814 bp, human
  misc_feature (207)..(207): n is a, c, g, or t
gttttctaatagacacagggaggccagttctgtttcagagcaattatcttcccaaattctctgttctggtgttggaactgtgtgccctggtttctgttttcctttctactgctgtaattctctgtctcatcatccttctcttttgtttccatagccttttataatgcatatatcgatgctgtgaacagaaataaattatttatacanatcaaaaaaacaaaacaaacaaaaacaaaacacacaacaaacaacacaaacaaaacaaaaacaaacaaaacaaacacacaaacacaacaaacaaacaaaagagatgctgtggcgcgccgcgcgcgccgcgcgcgcgcgccgcacagcagaggatcgcgatcttctctatagacacacacaacatgctctgcgtgtgtggcgcgcgcgcgcgcgcgcggcccccccaagcagggagccgtgagtgaagagagagagagacgtggtgccctcactaggggggcgtgctcctgtccgagagagcagagacagcccgcgcgtgcagccgtaaacaaacacagagtggggggcgagtgtagcctctccccccaaccacacaaaaaaacaagaacagccgcgcgcgcgcgggagagagcaccaaagaagcgctggggggaggtgtgcagagagacgcacaaccaccgctctcgcgacggcgcgggggtgtggtatcgagagagagggagtcaactaactcggtgggcgttgcgtactctaatagccaggggaggggacggccacacagcggagcgagcgacggccccgcgatcaaataagaaattatcccgcc

SEQ ID NO: 143 - DNA, 1741 bp, human
ctaggtagctggcaccaggagccgtgggcaagggaagaggccacaccctgccctgctctgctgcagccagaatgggtgtgaaggcgtctcaaacaggctttgtggtcctggtgctgctccagtgctgctctgcatacaaactggtctgctactacaccagctggtcccagtaccgggaaggcgatgggagctgcttcccagatgcccttgaccgcttcctctgtacccacatcatctacagctttgccaatataagcaacgatcacatcgacacctgggagtggaatgatgtgacgctctacggcatgctcaacacactcaagaacaggaaccccaacctgaagactctcttgtctgtcggaggatggaactttgggtctcaaagattttccaagatagcctccaacacccagagtcgccggactttcatcaagtcagtaccgccattcctgcgcacccatggctttgatgggctggaccttgcctggctctaccctggacggagagacaaacagcattttaccaccctaatcaaggaaatgaaggccgaatttataaaggaagcccagccagggaaaaagcagctcctgctcagcgcagcactgtctgcggggaaggtcaccattgacagcagctatgacattgccaagatatcccaacacctggatttcattagcatcatgacctacgattttcatggagcctggcgtgggaccacaggccatcacagtcccctgttccgaggtcaggaggatgcaagtcctgacagattcagcaacactgactatgctgtggggtacatgttgaggctgggggctcctgccagtaagctggtgatgggcatccccaccttcgggaggagcttcactctggcttcttctgagactggtgttggagccccaatctcaggaccgggaattccaggccggttcaccaaggaggcagggacccttgcctactatgagatctgtgacttcctccgcggagccacagtccatagaaccctcggccagcaggtcccctatgccaccaagggcaaccagtgggtaggatacgacgaccaggaaagcgtcaaaagcaaggtgcagtacctgaaggataggcagctggcaggcgccatggtatgggccctggacctggatgacttccagggctccttctgcggccaggatctgcgcttccctctcaccaatgccatcaaggatgcactcgctgcaacgtagccctctgttctgcacacagcacgggggccaaggatgccccgtccccctctggctccagctggccgggagcctgatcacctgccctgctgagtcccaggctgagcctcagtctccctcccttggggcctatgcagaggtccacaacacacagatttgagctcagccctggtgggcagagaggtagggatggggctgtggggatagtgaggcatcgcaatgtaagactcgggattagtacacacttgttgatgattaatggaaatgtttacagatccccaagcctggcaagggaatttcttcaactccctgccccctagccctccttatcaaaggacaccattttggcaagctctatcaccaaggagccaaacatcctacaagacacagtgaccatactaattataccccctgcaaagccagcttgaaaccttcacttaggaacgtaatcgtgtcccctatcctacttccccttcctaattccacagctgctcaataaagtacaagagtttaacagtgtg

SEQ ID NO: 144 - DNA, 561 bp, human
  misc_feature (265)..(265): n is a, c, g, or t
ttttgaattttcacaaaggtgtaaatttattcctaagcagttaaaatgaaaatttgagtttgaaagggtagcatgctgatacattaagaggaaaaagacaagtttaagattttaaactgtgtccacagaagaataaacaatctaaatcttttctcccccgttaggtcaatattgaaggaggggctatagccttgggccaccctcttggagcatctggctgtcgaattcttgtgaccctgttacacacactggagagaatgggcanaagtcgtggtgttgcaaccctgtgcattgggggtgggatgggaatagcaatgtgtgttcagagagaatgaattgcttaaactttgaacaacctcaatttctttttaaactaataaagtactaggttgcaatatgtgaaatcagaggaccaaagtacagatggaaaccatttcctacatcacaaaaacccaagtttacagcttgtactttactttaatgtgtaatactcaactcaaggtacaagacaattgcatttaacattgttataaataaaaggaacatcagatcaatcattaa

SEQ ID NO: 145 - DNA, 3224 bp, human
gtcccacatcccgcatccggcatcccagcggccgggcatgtagcagcggcagcaacggcggaatatgggcgggaaccactcccacaagccccccgtgtttgacgagaatgaggaagtcaactttgaccattttcagattctgcgggccattggtaaagggagttttggaaaggtatgcatcgtgcagaagcgagacactaagaaaatgtatgcaatgaagtacatgaacaagcagaagtgcatcgagagggatgaggttcggaatgttttccgggagctgcagatcatgcaagggctggagcaccccttcctggtcaatctgtggtactccttccaggatgaggaggacatgttcatggtggtggacctgctcctgggaggcgacctgcgctaccatctgcagcagaatgtgcatttcacagaggggactgtgaaactctacatctgtgagctggcactggccctggagtatcttcagaggtaccacatcatccacagagacatcaagccagacaatatcctgctggatgaacacggacatgttcacattacagacttcaacatagcgacggtagtgaaaggagcagaaagggcttcctccatggctggcaccaagccctacatggctccagaagtattccaggtgtacatggacagaggccccggatactcgtaccctgtcgactggtggtccctgggcatcacagcctatgagctgctgcggggctggaggccgtacgaaatccactcggtcacgcccatcgatgaaatcctcaacatgttcaaggtggagcgtgtccactactcctccacgtggtgcaaggggatggtggccctgctgaggaagctcctgaccaaggatcctgagagccgcgtgtccagccttcatgacatacagagcgtgccctacttggccgacatgaactgggacgcggtgttcaagaaggcactgatgcccggctttgtgcccaataaagggaggttgaactgcgatcccacatttgagcttgaagagatgattctagaatccaagccacttcacaaaaagaagaagcgattggcaaagaacagatccagggatggcacaaaggacagctgcccgctgaatggacacctgcagcactgtttggagactgtccgggaggaattcatcatattcaacagagagaagctcaggaggcagcagggacagggcagccagctcttggacaccgacagccgagggggaggccaggcccaaagcaagctccaggacgggtgcaacaacaacctcctcacccacacctgcacccgtggctgcagcagctgagcccacacttgttgctgctcaacaggactgcactcgtctctgccctgcccacccagagcccctctttgtgccctgatggtccctgtctcacccctgaaaacatcagatgcagaaaaagccctggacttggagctgggaagcctgggttctggtcccatctccatgactgattcacgtgtgacctcagacaagtcacgccctctctgtgcctccgttttctgcatctgccaaaggggttaaacacttctgccccacttcaaattacaagattatggggagaacccaattaggtaggaaacatgaaaaacctttgatatttataaaatcatttttacgtgcaaaatataaccttaatatttgaagtgacccccattccccaaagcaatcaaaccgtcatgactttgcaatttggcacatcctagcttgttagagggcacttccgaaaaacacagccctgacagcaaaataaaggtctgatatgttggccccttctatggaaacaacgctgccaaatcctggagcaaaacctgaagtgtcttcatgtgcattctctggcaggccacagtcctgagcttgtaagatggtgcagcatgcagaccagacttgtccccaaggtctcagcgctgcggtctcactcctcccctcatttaagaagactatccttaccttttagtttcagcagtcctcaccaccaccatatccccagtgctgggatggcacacaggtgtccattcagatgagagttgggtcgctgagcattggttactcctgcagagtgtaatcagcaccccatccaactggcccgaaagcccagacctgcagcagaactctccaactctctatcagctttcagggttttctctcctgggaagggtgtaaaatcagcttgtcagattcttcttacagagagtatccaatcggtattggtggagcggctccctatttatacaataggaagcatgggtgcttagaaagtttatttcaggaggaaaatgggttcacacaaaaagcaaactacattctgatctgctcagggagaagcttgcctttgaactggaagatgttgggatgagcagggaaagcttagactttggagtcaggtttgtgttcagaatccagccctgctggctactaactaactgggagaccttaggcaaagcatgcaatcgctctgaatggcagtttcctcatttttaaacagggataataaaactaatattgcaggggagttacagggttaaataagatcctgtgtgtaaccccaagcattggatgactcatagaatggccttttttgtcagcataatcgtcatcattatttagatactttcttccttcactcacccagcaggtcagttttctgtgcaaacaaacctgtttaggattcttccaaatgttcttcctggggtctttgatatttgtttgttacatcctgctgaagttcgactgtgtttttattttttcatccaacttccatttttcactttttacatgattactcaatccttggggctgtccatgtcatctcttagatttcttaaaagacattttaatgtatggttaggttttatatttttattttttaaaaaagaaatagtcagtgttttcctcctttcaaccgagactatttctggattgtgtgctcctcgtcagttgacttgttttgcacacttttctttacttcatgtccccatcaacaaccgtcctgctccccacctcccccaggaaataaggggcctgctcctctccctactgtgaccctggaggctcttaagatgatgatggttttttttattgggctgagttcacgaattaggggcaggagctggaagtcgccctaggaacaccagatttcctggttctgttcaagttggcatttcttgtttggaataaactatttcttggacattccttc

SEQ ID NO: 146 - DNA, 4086 bp, human
atttatgctctcagccttgtgttgtcaatttggaagcagttgtttcatctgagttcagaagtagcattcccgtgtacaaaaaaaggtggaagaatgagaaacatcttcacaccagcaggacacaaatagtacatgtgaaatttccaagcattatggtttacagagatgattatttcatcagacattccatctctgtatctgcagtgatagtacgcgcctggattactcacaaatacagtggcagagactggaatgttaaatgggaggaaaacttgctccatgctgtagcaaagaattataccctcctgcagaccatcccgccttttgaacgccctttcaaagatcatcaagtgtgccttgagtggaacatgggttatatttggaaccttcgggcaaacaggattccacagtgtcctctggaaaatgatgtggttgccctgcttggctttccttatgcctccagtggagaaaacacaggcattgtcaagaagttcccgaggtttcggaaccgagagctggaggccactcgacgccagaggatggattacccagtgtttactgtttcattgtggctttatttactccattattgcaaggccaacctctgtgggattctgtactttgttgactctaatgagatgtacggcacaccttctgtatttcttacggaagagggctatttgcatattcagatgcatcttgtcaaaggggaagaccttgctgtaaaaactaaattcatcatacctttgaaggagtggtttcgactggatatctcttttaacggaggccagatagtagtaaccactagcattggacaggatttgaaaagctaccacaatcagaccattagcttccgggaggatttccattataatgacacagctgggtacttcattattggagggagcaggtatgtggctggcattgaagggttttttggacccctgaagtactatcgccttcgcagtctgcaccccgcccagatttttaatcccctccttgagaagcaacttgctgaacaaatcaagttatattatgaaaggtgtgctgaggttcaagaaatagtatctgtgtatgcatctgcagcaaagcacgggggcgagagacaagaagcatgccacctccacaactcctacctggacctccagcgcaggtatgggagaccctcgatgtgcagagccttcccctgggagaaggagctgaaagacaaacaccccagcttgttccaggcattgctggagatggatctgctgaccgtgccaaggaaccaaaatgaatctgtatcagaaatcggtgggaagatatttgagaaggctgtaaagagactctctagcattgatggtcttcaccaaattagctctatcgtcccctttctgacggattccagctgctgtggataccataaagcatcctactaccttgcagtcttttatgagactggattaaatgttcctcgggatcagctgcagggcatgttgtatagtttggttggaggccaggggagtgagaggctgtcttcaatgaatcttgggtataaacactaccagggtattgacaactaccccctggactgggaactgtcgtatgcctactacagcaacattgccaccaagacaccccttgaccagcacacactgcaaggagatcaggcatatgttgaaacaattagactaaaagatgatgaaatactcaaggtacaaaccaaagaagatggagatgtctttatgtggttgaagcatgaagctacccgaggcaatgcagcagctcagcaacgattggcccagatgctgttctgggggcagcaaggtgtggccaagaatcccgaagcagcaattgagtggtacgccaagggcgccctggagacggaggatcctgcgttaatctatgactatgccattgtgctattcaagggtcaaggagtaaaaaagaacagacggcttgccttagagctgatgaagaaagcagcttccaagggattgcatcaggcagtcaatggcctgggatggtattaccacaaattcaagaaaaattacgccaaagcagcaaagtactggttaaaagcagaagaaatggggaacccagatgcgtcatacaatcttggagtcctgcatttggatggcatcttccctggagttcctggaaggaatcaaactttagctggtgaatatttccataaggctgcgcaaggtggacacatggaagggaccttgtggtgttctctctactatatcacaggcaacctggagacattccctagagatcctgagaaagctgttgtatgggcaaaacatgtagctgagaaaaatggctacttgggccatgtcatccgcaaaggcctcaatgcctacctggaaggttcatggcatgaagctttgctgtattatgttttagcagcagaaactggaattgaagtgtcacagacaaatttagcacacatctgtgaggagaggccagacctggccaggagatacttgggtgttaactgtgtttggagatactataatttctctgtttttcaaatcgatgctccttcctttgcatatttgaagatgggagacctttactactatggccaccaaaaccagtcacaagacctggagttgtctgtgcagatgtacgcccaagccgccctggatggagactcccagggattttttaacctggccctgctaatcgaggaaggtacgataatcccacaccatatcttggatttcttggaaattgactcaactctccattctaataacatctccattctccaggaactgtacgaaaggtgctggagccacagtaacgaggagtccttcagcccctgctccttggcctggctttacctgcacttgcggcttctctggggtgctatcctgcactcagccctgatctactttctgggaacctttctgctatccatattgatcgcctggactgtgcagtatttccagtctgtctcagcaagcgatccccctccaagaccatcccaggcctccccagacactgccacgtccactgcaagtccagctgtgactccagctgcagatgcctctgaccaagaccagcccacagtaactaataacccggagccacgtgggtgaactgtgcactccagttctctccagatgagagagaatcttttcaacagctggtattgggaagctggggccagggcatgatcctgataaacaccttaaatgtcttgtcaactggatgcaaattttgcaattggtgtcattttttttaaagtcaaattacaaggaagtacccagatcaggcagtggtaataccaaaggtcatcaaacacatacaaggaacatcttgatcatagggcatgtggggaagtttactgggccatcacagacttttgttctagtgattgtatgtattaggagtcatagcatgccctacggcagatctggattcttatacactaagatgtgtcttaagaatcacagtgcgtgcttcatccctttattgaagaacagaaaattatgactactctacaaggtggataatattttggtacctgtgcttgccacagccctgttcctcaaagctgaattgatagatttctctttgacttccaagacctagcagttataaggcaccttgaaataaattgtttgtgcctggaaatgcagggagggcaatagctttgtaaattggtttacatttttctccttgaatttttctagggtcctagtgcttccgaatcatttaatggcattgtcggatatcttttacatttcaattgcaatccatgaaattacatttagaagattcttagtacttaactgtagtcttctccatgaattacacgttagaatagactggcagcaacggaatatgcagcaagtaagcctctagcttatagtttcatccctacccctcatgcctgcgtgagtctgtacagggatatgtgtgtgtgtgtgtgtgtgtgtgtgtgtgtgtgttagagaggaagaggaagagcagaatgtctgtatactacatgctgctaaggtagtgaataaatcagtaatgcaatattgtgggtccaaactactctttgcactactttatttacagtagtaaataaaattatttttatac

SEQ ID NO: 147 - DNA, 470 bp, human
aatgttagaatgaaaaattttatcatcactcctgttcaccccgcagagtctgcggagtgctaaagggcacaccaataaggatccgagggagggggtctacatctgctttttcagcccccaaagccatatattggggtggcccaatataaagctactcattagtttggttcctgagcagacctgctaataaacctcaaaaacacaaaagtctacttcactagccagaaatgaaagcaggatctagatctgagtgggaagggcagagggcagcatgggttgactctagttggaattgtgccagtcttctctggaggccgactcactcgtggagtggggaaaggggtggccaggccccagtctagaaaccccaggcctatgggaagtgatgccaggggaagggaagcagataagctggtggctagttcccaggaaggcaccaacctccaaaatcacctaggcaaggacagatg

SEQ ID NO: 148 - DNA, 953 bp, human
agcggcgcaagcggcggcggccactgccacgtattcccggcagtggtggcgggggcggcggcggcgcccgcgggcaggaataactcaagtcacctgtactggaaatcagtttgctgaaattaatcaacgattcttgaagttgaagaaaaggaggttccagccttggcaagaggagtgtggcccttcctggaatccctctggacacaccctcctagcatcctctaggaaagatgcggcagctcaaagggaagcccaagaaggagacctccaaggacaagaaggagcggaagcaagccatgcaggaggcccggcagcagatcactacagtggtgctgcccacgctggccgtggtcgtgctcttgatcgtggtgtttgtgtacgtggccacgcgccccaccatcaccgagtgagccccgcagccggctgcggaccccatcggcagggagaggaaggcgcgggagggggacgcaaacaaaaaaatggctttcatattcagagatgttcatgttgctgagctgtaagcaggagcaccctgtcttctctggtctttgacttgattaaagtatctccgctttcttgggagggaataggggatgttttatcagtgaatgtgccatacaccttatggtccacttcatgtgcctttcagacttcaaagcgcgcgcgcatgtgtgtgtgtgtgtgtgtgtgtgtgtgtgtgtgtgtgtgcttctttttctctcctaaaaatcgataagtagctccacctgaagagggatggaacctctgggtcaggaaacagctggaatccacactcacctcattcccattgtttggatcatgcttctttccaacacgtgttcacaatctccaaagggactgtatttcttctctgtgcttaatgtgatttgaaatatgttgaatcaaagtgaaatatttattttttgaataaaggagataatagccttaaaaaa

SEQ ID NO: 149 - DNA, 1658 bp, human
aagctgggagggaagaagaaagggaggggaggggagaatcgaggacggacggcctagccaggccaagaatgcaattgccccggtggtgggagctgggagacccctgtgcttggacgggacagggtcgggggacacgcaggatgagccccgcgaccactggcacattcttgctgacagtgtacagtattttctccaaggtacactccgatcggaatgtatacccatcagcaggtgtcctctttgttcatgttttggaaagagaatattttaagggggaatttccaccttacccaaaacctggcgagattagtaatgatcccataacatttaatacaaatttaatgggttacccagaccgacctggatggcttcgatatatccaaaggacaccatatagtgatggagtcctatatgggtccccaacagctgaaaatgtggggaagccaacaatcattgagataactgcctacaacaggcgcacctttgagactgcaaggcataatttgataattaatataatgtctgcagaagacttcccgttgccatatcaagcagaattcttcattaagaatatgaatgtagaagaaatgttggccagtgaggttcttggagactttcttggcgcagtgaaaaatgtgtggcagccagagcgcctgaacgccataaacatcacatcggccctagacaggggtggcagggtgccacttcccattaatgacctgaaggagggcgtttatgtcatggttggtgcagatgtcccgttttcttcttgtttacgagaagttgaaaatccacagaatcaattgagatgtagtcaagaaatggagcctgtaataacatgtgataaaaaatttcgtactcaattttacattgactggtgcaaaatttcattggttgataaaacaaagcaagtgtccacctatcaggaagtgattcgtggagaggggattttacctgatggtggagaatacaaacccccttctgattctttgaaaagcagagactattacacggatttcctaattacactggctgtgccctcggcagtggcactggtcctttttctaatacttgcttatatcatgtgctgccgacgggaaggcgtggaaaagagaaacatgcaaacaccagacatccaactggtccatcacagtgctattcagaaatctaccaaggagcttcgagacatgtccaagaatagagagatagcatggcccctgtcaacgcttcctgtgttccaccctgtgactggggaaatcatacctcctttacacacagacaactatgatagcacaaacatgccattgatgcaaacgcagcagaacttgccacatcagactcagattccccaacagcagactacaggtaaatggtatccctgaagaaagaaaactgactgaagcaatgaatttataatcagacaatatagcagttacatcacatttcttttctcttccaataatgcatgagcttttctggcatatgttatgcatgttggcagtattaagtgtataccaaataatacaacataactttcattttactaatgtatttttttgtacttaaagcatttttgacaatttgtaaaacattgatgactttatatttgttacaataaaagttgatctttaaaataaatattattaatgaaaaaaaag

SEQ ID NO: 150 - DNA, 876 bp, human
ctaacgtaatattctttatgaaagcattagctgctttgttacatttttaatatgcaaccacttcttcacctgaggaaaactagaatgaaatgcagtctaaaatattttgcactgaattgtaatttcttcattagtttagtctggaaactggtctgttttaatgtgttttttaaatgctgtatgtagaggaaaatctgcagaccactggaatacatttgttaaactctcatctgcagggacactgggcgatacttggcagtgactgttctaccttgaggctttgtttggtttatttattaaagtgtacagtatttaaaaatcaaacatagctttagttaaaacactaagctgaattagtcatgtccattcagacataacctgaactactgaaaagatcaatttccagaaggtttattctgtataaactacatgttagtcttcagtagagtatcttttttttttcctttttttttctttttaattccggtggttggatgtgcctatgttttcggtttgccggtagtaaataaccttggatcttccaaaaaaaaaaaaacaaaaagatattcgataactacagtacatcgcagctacaaaacgggggggctgtcataatgataattaccgccaggatggaaactatatcaatgcctacccccctatcttgtgttcgaaaaaagtggtccatatgttagacgtaactatcaactacaatctatcagtgttattacaatcatgcgtgatagaaaaagttgttatgactacttgttggagacccatccgtgtggtgggaataatggagaccacacagctatataacccgggaataaatacgacttatgagcaacctgtttgttgaaaaattattacataata

SEQ ID NO: 151 - DNA, 2932 bp, human
agagaggagccgactcggcagggactgggggaccgggccgagagtgcgagcgagcgagggagggagtgagggagcgtgcgagccagaaggggaaaggcggccactcgtgcctgagcgaccgcagaggggagtgggagcagtggggtaaaggagcggggggcgggaataagaaaggccgagagaaggcggacagaggctagtggtggtggtggtggtagggggagaaggaggagctggaggagggcaggggctgagggagtgagtgaagcggacgcgcgagggaggggagggaagggaagggaagggaagggggggtcacgcgggggcgcgcgcgcgcaccgggagcgcgctcggaggcgagtggaactggatcgggtttgctgccagcggcgtgagcttcggccgccattttacaacagctccactcgcgccggacacagggagcagcgagcacgcgtttcccgcaacccgataccatcggacaggatttctccgcctcagcccaacggggagatctctggaaacatggctacagaacatgttaatggaaatggtactgaagagcccatggatactacttctgcagttatccattcagaaaattttcagacattgcttgatgctggtttaccacagaaagttgctgaaaaactagatgaaatttacgttgcagggctagttgcacatagtgatttagatgaaagagctattgaagctttaaaagaattcaatgaagacggtgcattggcagttcttcaacagtttaaagacagtgatctctctcatgttcagaacaaaagtgcctttttatgtggagtcatgaagacttacaggcagagagaaaaacaagggaccaaagtagcagattctagtaaaggaccagatgaggcaaaaattaaggcactcttggaaagaacaggctacacacttgatgtgaccactggacagaggaagtatggaggaccacctccagattccgtttattcaggtcagcagccttctgttggcactgagatatttgtgggaaagatcccaagagatctatttgaggatgaacttgttccattatttgagaaagctggacctatatgggatcttcgtctaatgatggatccactcactggtctcaatagaggttatgcgtttgtcactttttgtacaaaagaagcagctcaggaggctgttaaactgtataataatcatgaaattcgttctggaaaacatattggtgtctgcatctcagttgccaacaataggctttttgtgggctctattcctaagagtaaaaccaaggaacagattcttgaagaatttagcaaagtaacagagggtcttacagacgtcattttataccaccaaccggatgacaagaaaaaaaacaggagcttttgctttcttgaatatgaagatcacaaaacagctgcccaggcaaggcgtaggttaatgagtggtaaagtcaaggtctgggggaatgttggaactgttgaatgggctgatcctatagaagatcctgatcctgaggttatggcaaaggtaaaagtgctgtttgtacgcaaccttgccaatactgtaacagaagagattttagaaaaggcatttagtcagtttgggaaactggaacgagtgaagaagttaaaagattatgcgttcattcattttgatgagcgagatggtgctgtcaaggctatggaagaaatgaatggcaaagacttggagggagaaaatattgaaattgtttttgccaagccaccagatcagaaaaggaaagaaagaaaagctcagaggcaagcagcaaaaaatcaaatgtatgacgattactactattatggtccacctcatatgccccctccaacaagaggtcgagggcgtggaggtagaggtggttatggatatcctccagattattatggatatgaagattattatgattattatggttatgattaccataactatcgtggtggatatgaagatccatactatggttatgaagattttcaagttggagctagaggaaggggtggtagaggagcaaggggtgctgctccatccagaggtcgtggggctgctcctccccgcggtagagccggttattcacagagaggaggtcctggatcagcaagaggcgttcgaggtgcgagaggaggtgcccaacaacaaagaggccgcggggtacgtggtgcgaggggtggccgcggtggaaatgtaggaggaaagcgcaaagctgatgggtacaaccagccagattccaagcggcgccagaccaataatcagaactggggctcccaacccattgctcagcaaccgctccaaggtggtgatcattctggtaactatggttacaaatctgaaaaccaggagttttatcaggatacttttgggcaacagtggaagtagaaacagtagggcctctgtaaaattggagactgataggttgatcagaaactcaccctaaatctgaacgggtgccgctataatttgtgacatctggcaagatttccctttatgtatatattttaacaatccgcttggacacgaacaaagccacacttctaactgcttctggcgaactgattttatttttaatttttttcaataaagatattcttagatactgaaagaaatagttaatgagtttgcatttgtgcttgagaaaatttggctcaagtccatttggctgtagtgtcaacgatgtttccagtagtgtttagatttggtgtcttcaaaggtagttgattaaaaccaagtgtgtctttaatatcttgtatcagaataactttgtatgttaccaacttaaattgctagaataaggtaaattgatacacaactgctatttttaatttagaactttgacctaatttgggttttcaaaaccattttggctacttgtattctttatgctgttgtttatttcaataaaaaattcacacct

SEQ ID NO: 152 - DNA, 3353 bp, human
tccaagctacgccactcgggctggggcgttgggagcgggagtgcagagcgtggtcgtggcggcggcggtgagaagagcgaggcggaggagggggtgccatggccgggcagcagttccagtacgatgacagtgggaacaccttcttctacttcctcacctccttcgtggggctcatcgtgatcccggcgacatactacctctggccccgagatcagaatgccgagcaaattcgattaaagaatatcagaaaagtatatggaaggtgtatgtggtatcgtttacggttattaaaaccccagccaaatattattcctacagtaaagaaaatagttctgcttgcaggatgggcattgttcttattccttgcatataaagtttccaaaacagaccgagaataccaagaatacaatccttatgaagtattaaatttggatcctggagccacagtagcagaaattaaaaaacaatatcgtttgctgtcacttaaatatcatccagataaaggaggtgatgaggttatgttcatgaggatagcaaaagcttatgctgctttaacggatgaagagtcccggaaaaattgggaagaatttggaaatccagatgggcctcaagccacaagctttggaattgccctgccagcttggatagttgaccagaaaaattcaattctggttttacttgtatatggattggcatttatggttatccttccagttgttgtgggctcttggtggtatcgctcaatacgctatagtggagaccagattctaatacgcacaacacagatttatacatactttgtttataaaacccgaaatatggatatgaaacgtcttatcatggttttggctggagcttctgaatttgatcctcagtataataaagatgccacaagcagaccaacggataatattctaataccacagctaatcagagaaattggcagcattaatttaaagaagaatgagcctccacttacctgcccatatagcctgaaggccagagttcttttactgtctcatcttgctagaatgaaaattcctgagacccttgaagaagatcagcaattcatgctaaaaaagtgtcctgccctacttcaagaaatggttaatgtaatctgccaactaatagtaatggcccggaaccgtgaagaaagggagtttcgtgctccaactttggcatccctagaaaactgcatgaagctttctcagatggccgttcagggacttcagcaatttaagtctccccttctgcagctccctcatattgaagaggacaatcttagacgggtttctaatcataagaagtataaaattaaaactatccaggatttggtgagtttaaaagaatcagatcgtcacactctactgcacttccttgaagatgaaaaatatgaagaggttatggctgtccttgggagttttccatatgtgaccatggatataaaatcacaggtgttagatgatgaagatagcaacaacatcacagtaggatccttagttacagtgttggttaagttgacaaggcaaacaatggctgaagtatttgaaaaggagcagtccatctgtgctgcagaggaacagccagcagaagatgggcagggtgaaactaacaagaacaggacaaaaggaggatggcaacagaagagtaaaggacccaagaaaactgctaaatcaaaaaaaaagaaacctttaaaaaaaaaacctacacctgtgctattaccacagtcaaagcaacagaaacaaaagcaggcaaatggagtcgttgggaatgaagctgcagtaaaggaagatgaagaagaagtttcagataagggcagtgattctgaagaagaagaaaccaatagagattcccaaagtgagaaagatgatggtagtgacagagactctgatagagagcaagatgaaaaacaaaacaaagatgatgaagcagagtggcaagaattacaacaaagcatacagcgaaaagagagagctctattggaaaccaaatcaaaaataacacatcctgtgtatagcctttactttcctgaggaaaaacaagaatggtggtggctttacattgcagataggaaggagcagacattaatatccatgccatatcatgtgtgtacgctgaaagatacagaggaggtagagctgaagtttcctgcaccaggcaagcctggaaattatcagtatactgtgtttctgagatcagactcctatatgggtttggatcagattaaaccattgaagttggaagttcatgaggctaagcctgtgccagaaaatcacccacagtgggatacagcaatagagggggatgaagaccaggaggacagtgagggctttgaagatagctttgaggaagaagaggaggaagaagaagatgatgactaagcagtactctgaatggaccacagtgtttgcacatatttgcaattttttgctgttttgaaagtgtatcataaaccagaacagtacagaactgatgttgaggaaggtgtagtttttttactctagaaatgggtgcataatataactaggcagtggcggtgccttggtacaacctgaaaaatgttaaggcttattgaaacctttcaagtaggggatggtacatttatttcatctgcaaatgataataaatcctttgttattataactgtccagaagtgtgggctatgtattatctgatcagtctatggtcccagtaaaagtaaagatgcaggaaacacagtctgtaaatgagcgacttttctttgttcagctttagttttagcaaacaccacaaatatgttttaagtaacatcgctcaagtttaagtaacatcgctcaagttgataatctcttgataagctctgttgttgacattttgcagtgatacaacagctccactcatagatttaaacttttatttttacttatcttggtcataagttggcattctctcacattccacatgatatagagggctacgttttggaattttccttttcttaattgcccagagttatcagacagattataaaaatggcttttaatggcttaaaccatttctaaacctctatcttagcagatcaatgcaggatctaattcttttgataagttctagctctaaaagtgatagtgggactgtatgttttctgatactggtggcttatgttattaaaccttttttaaaaaaggttcactctaaaagctgaactacatccttagttttcagtctacttgactctatcaggagctttttaaggaaagtaagtataacatgcaaaggaagctttttttgtattcattttggactcctgtcaataaaaatagaagtttgttgactcgtaaaaaaaaaaaaaaaagaactcgagggggggaacg

SEQ ID NO: 153 - DNA, 2558 bp, human
  misc_feature (360)..(360): n is a, c, g, or t
gaattccggctcccgcggctgcaggcgcgcgcctagagtgcctggcgggctccggcttccgcgtccgccccggccccggtccagacttagtcttcagctccgcgcccgctccgccgcggcccaccgcgcccgccggcagccgagcccccagcgacgcccgcacagctccgggtgcccagacagggggccatgccgtgccggagggaggaggaagaggaagccggcgaggaggcggagggggaggaagaggaggaggacagcttcctcctactgcagcagtcagtggcgctgggcagctcgggcgaggtggaccggctggtggcccagatcggcgagacgctgcagctggacgcggcgcangacagcccggcctcgccgtgcgggcccccgggggcgccgctgcgggccccggggcccctggctgcggcggtgccggcggacaaggccaggtccccggcggtgccgctgctgctgccgcccgcgttggcggagactgtgggcccggcgccccctggggtcctgcgctgcgccctgggggaccgcggccgcgtgcggggccgcgctgcgccctactgcgtggccgagctcgccacaggccccagcgcgctgtccccactgccccctcaggccgaccttgatgggcctccgggagctggcaagcagggcatcccgcagccgctgtcgggtccgtgccggcgaggatggctccggggcgccgccgcctcccgccgcctgcagcagcgacgcgggtcccaaccagaaacccgcacaggcgacgacgacccgcaccggcttctgcagcagctagtgctctctggaaacctcatcaaggaggccgtgcgaaggcttcattcgcgacggctgcagttacgtgcaaagcttccccaacgcccgctcctgggacctctgtcggccccggtgcatgaacccccttcgcctcgcagccctcgcgcggcctgcagtgaccctggcgcctccgggagggcgcagctcagaactggcgacggcgttcttgtgcctggcagctaacacgcccggggtggccacagcgccagcctcagactggagggcaaggggttcccttgagggctgcagttctactcaggctggtggagaactctggcttttggaagcgagagtaaaaagctaatgacgaggaaccgaaaaatcgcgagtgtttcgcgggtaactggggttgagggccaaaatatttggaatgaaggacttggccctatttaaggcagattttacagagcgcacctcaaacgtacaagtcagtaggactccttatttggcgtgacccgacctggccgcggagcctgcatttcctcgcagcctctcagtgccctccagccccgcgaccatgtggccacaatccacgcttctccggatcgcggtgcgccggaaccacggaggatgatgccagttacttgctttaccttttcagggctggctcctgatccactttgggggaggagaacatgagtagataatttcagggtgcagcccaatctgccagacttaaaaaaaccatcttgtgtctttggaggtgctgcttaatatcaaacatgcggtgccatgaagggaccctttgggggttgaataggagttaacccctgcgctctctttgcaactgtctctcttctcagagtggtgggggaaggctgtacgacacgggtggggaaaggaggtgggggcggggagtattgaatggtggtggaagggtagagaggcgcggagtgaaccccacgccctgtctaaagtgtattttcagagccggcccgcctctcctcggttcaaggtcactgtttcctgggcacgcactgggttgcgggacagagtagccagtttctgccggtgctcggagaagagcgcagtgttttgcaagtgctggagtctcctgaggacacgcgcgtcgccgccaccgcgggtgtgggaaagcgcggacgtgctgggcgtctgtgcttcggtaggcgaccaccgcccctggccgcgctccgggctttcacggaaactcccgagaccgggccctgggttcctcctctcctactcggctctgcagtcctactcaagcgggtggctctgggatcctgggggcctgggttgggggctagggagacgccatgtgatggacactccagggacacacagcctagcacagcagcttataatgggctctccggggccatttgcaataacagctgcaattccctggatagacgagttgatttcctccctctgcccctcccccagccatgccagctggcctttgtaagtgcaggaaaccgagtagaaaatgtgaccctccaaatggagaagctgccagctttgccattgtgaaccatggtgaagtgcttggaacatactgttcactcactctaaaggcgctgagactgtgctgttgttctcgtttttatagtcaatggcttgttcatcatccagatgtggctactgacatatctacacttcgcaccggagtgtctggaattgtggctatcctgattataggattttaacttaactgaaatgcctgctttgaataaatgtgttgggttttt

SEQ ID NO: 154 - DNA, 1469 bp, human
tcagtgtttacttctgccgcctgccagccgggcggggaaggggagtacccggccacccctcactttagctcctgcagctttccaaacaaaccagggcgggatgggagtgtcttcttggctgtggaaatcgatcctcctaccttgtcctgaagccacccgccgcctttcctcgtccctcccttcgcggtgattttccggtcccggcgcccggcgagggcgcgcggctggtgtccgccccgcccgaaaggtgagccagccatgagagggtatcttgtggccatattcctgagtgctgtcttcctctattatgtactgcattgcatattatggggaacgaatgtctattgggtggcacctgtggaaatgaaacggagaaataagatccagccttgtttatcaaagccagcttttgcctctctgctgaggtttcatcagtttcacccttttctgtgtgcggctgattttagaaagattgcttccttgtatggtagcgataagtttgatttgccctatgggatgagaacatcagcggaatattttcgacttgctctttcaaaactgcagagttgtgatctctttgatgagtttgacaacataccctgtaaaaagtgtgtggtggttggtaatggaggagttttgaagaataagacattaggagaaaaaatcgactcctatgatgtaataataagaatgaataatggtcctgttttaggacatgaagaagaagttgggagaaggacaaccttccgacttttttatccagaatctgttttttcagatcctattcacaatgaccctaatacgacagtgattctcactgcttttaagccacatgatttaaggtggctgttggaattgttgatgggtgacaaaataaacactaatggtttttggaagaaaccagccttaaacctgatttataaaccttatcaaatccgaatattagatcctttcattatcagaacagcagcttatgaactgcttcattttccaaaagtgtttcccaaaaatcagaaacctaaacacccaacaacaggaattattgccatcacattggcgttttacatatgtcacgaagttcacctagctggttttaaatacaacttttctgacctcaagagtcctttgcactactatgggaatgccaccatgtctttgatgaataagaacgcgtatcacaatgtgactgcagagcagctctttttgaaggacattatagaaaaaaacctcgtaatcaacttgactcaagattgactctacagactcagaagatgatgctaacagtgttagttttatttttgtactgcaatttttagtttaaaatatgttggatgcactcgtcaaataattatgtatactgtctgttgctgcctggtgattcataaccaccagcttaatttctgtgaatactgtatatttaacttatgaaaaccaagaaattaaagataacaggaaaaaaaaaaaaaaaa

SEQ ID NO: 155 - DNA, 1328 bp, human
gtcccaactcttggactccatttgctattctcttctttctcccccacacctatctggtggtggtagtgggcgtttatatttgcgttccttttcattcatttctaaatctcttaaaaattttgggttgggggtattggggaaggcaggaaagggaaaaggagagtagtagctgaagagcaagaggaggacatggagatgaagaagaagattaacctggagttaaggaacagatccccggaggaggtgacagagttagtccttgataattgcctgtgtgtcaatggggaaattgaaggcctgaatgatactttcaaagaactagaatttctgagtatggctaatgtggaactaagttcgctggcccggcttcccagcttaaataaacttcgaaaattggagcttagtgataatataatttctggaggcttggaagtcctggcagagaaatgtccaaatcttacctacctcaatctgagtggaaacaaaataaaagatctcagtacagtagaagctctgcaaaatcttaaaaatttgaaaagtcttgacctgtttaactgtgagatcacaaacctggaagattatagagaaagtatttttgaactactgcagcaaatcacatacttagatggatttgatcaggaggataatgaagcgccggactctgaagaggaggatgatgaggatggagatgaagatgatgaagaggaagaggaaaatgaagctggtccaccggaaggatatgaggaagaggaggaggaagaggaagaggaggatgaggatgaggatgaagatgaagatgaagcaggttcagagttgggagagggagaagaggaagtgggcctctcatacttaatgaaagaagaaattcaggatgaagaagatgatgatgactatgttgaagaaggggaagaagaggaagaagaggaagaaggaggtcttcgaggggagaagaggaaacgagatgctgaagacgatggagaggaagaagatgactagatcattctaagaccagattctctaatgtttctgggtgtgcaatagagtgatcacatctttgtttcttcatgtacgatagctatccctacagaagataatgtgtaactttttataggaaaagtgtggttttactatttttgccttatcattccaaataagaactagtctgttaatgatcatattgtatgtagagaaaaattttcattgactcccattgtggaattccctagcaatttatttagacttaattttttaaattcaagcttactgtattagtcatttttagcccataattaaaacatgatcacttttaaaaaaaaaaaaaaaaaaaa

SEQ ID NO: 156 - DNA, 489 bp, human
catataataatttaatatatgccagccaaacaaagtatttgtatctttattcaattaaattaaaacagacctgccaggtatattatataacattcactatatacatatgatttaggcaatgcaagataattctagatatgctgattactcaactatgtgtaaaacatgagcggtgtcagtgatgcccagcaagtgctccttttcacattgggtgcctgcatttccatggtatggttagagggatagctacgagccatgacatggactaccagtaaacttctgtgggagaaggagggaaaatgacaatctagcatagattaacagtctcctaaatgcaaatagaatagttgacagttatttttttttaaaaagttcttctgtcatgttaatgacacaaaacttctcttttttgaaggcaacaccaccacattttgtttgggtgtgtggggacaggtggggggaatgctcttaaaattggtacaattattc

SEQ ID NO: 157 - DNA, 4098 bp, human
atgctgcaaatgccgaagttaaatgaaatacctccggggagggcaggccgcagggaggctcggggggagggaagatggcctggacaaacaggtcctgaagctgcgaggctggagtggagggcgcaggggcaggcgggcggcgccagagctccatgggacagctggggaagctccaggctacctacacaacctggcccaggctggtcacggtgtcccccctccctgctctgtgccctctccttccagaaatccaccatggagagtaaggatgaggtcagcgacaccgacagtggcatcatcctgcagtctggccccgacagcccggtctccccaatgaaggagctgacccatgcagtgcacaagcagcagagggccctggaagcgaggctggaggcctgcctggaggagctgaggagactctgccttcgggaagcggagctgacgggcaccttgccagcggagtatcccctcaaaccaggggaaaaggcccccaaggttcgccgcaggatcggagcggcttacaaactggatgactgggccttgcacagagaggaccccctaagcagcctggagcgccagctggccctgcagctgcagatcacagaggcagcccgtcggctgtgcctggaggagaacctcagcaggcaggctcggcggcagcggaagcactccatgctgcaggaggagaagaagctgcaggagctccagcgctgcctggtcgagcggcggcgcaatagcgagccacctccggctgctgctctccccctgggccgagagctcagtgcctctgatgacagctccctgtcagatgggctcctcctggaggaagaggaatcccaagtgccaaaacctcctccagagtctccagccccaccttctcggcctctcccaccccaaacccttgagggtctgcagccaacaggacctgaggctgggagcccagaacgggctccagtccagaacagcccctggaaggaaaccagcctggaccacccctatgagaagcccaggaagtcttctgagccctggagcgagtccagcagcccagccaccacaccacaggatgggcccagtgcctccagcctgtggcttctggagcctgcctcctaccacgtggttcccatccgtggtgttcctggccagtggcagggccgcaccagtgccccagccacccctgagatacaggggaggaggggccagtcgcagtctctgagggtggattccttccgggcgggtcctgagggccgaggtcgcagcgcctttccccgccgccgccccactcactacacggtgacagtgccagattcctgctttcccgcgaccaagcccccgctgccccacgccgcctgccactcctgctcagaagacagtggctctgacgtctccagcatctcccaccccacttcgccgggcagcagcagccccgacatctcctttctgcagcctctctcccctcccaagacccatcgtcaccgcggggcctgggtcccagccggcagcagagagctggtcgcccaccaccccaagctactgctgccgcctggctatttcccggcggggcggtacgtggtggtggctgagagccccctgccgcctggcgagtgggagctgtgccgcgcagccccgggccctgcttacgaggaggagggcactcccctgcgctaccagcgtctggtgccctcccgcagccgcatcgtgcggacgccctccctgaaggacagcccggcaggccgggggctcagcaaggccgccgtgtccgaggagctcaagtggtggcacgagcgtgcacgcctccggagcacccgaccccactcactggaccgccaaggagctttccgggtcaggagcctgccccttgggagagagggcttcggacgagccctgggaccccgggcacaggtgcccacagtttgtgtgctgtggagatcgcctgatggggcccctgtgcaagtctttgtacctgaaaaaggagagatcatcagccaggtgtaactctgcgccccacgctggaaaaaactgtttcatagaggggctgggctgagacccccccacccctgagtgcctctttcagctcccccatccccatcgcaggccgatgacctggagctaagaccttttattattttttttttacacgacttttttcagaagccctgacctaaggatttatatatgtggattgtcctcaatacccctgtgatatgattatgttttatcccccagagtttggcctactggacttaaggccttgcctgtctgactgacagcctctatctccttatataagacaagtggcaggggacgagtgaagcagagtgagccaccttgggagttctccaacgctctgtgctctggttctaagaaattccctggggaactgcccctggccctcctgtcccactattgctggaggctggacatggtacatactcatgcacatgactctcccccatttcccaggtctctgggtaccccagcctgggctgggggagaatctcttcccccttttctaatgtgctctgtgatgcacacaccaagtggtaggtcaaaggtcagtatatcccggtggtgtattgtcttgctagaccctgctattttcctgaccccctaaatcctctttagggacccagtcactataccctgtctatgccctgtgggctcccagacccctgagctttgagtcagtggcatcacagtttgtagcctcagggggtctggctgggggctggtccatgcttgtggttagtggacagcagccaccctttgacagctacctctggacatctcaagggcttgcagccccactgctccttctaacattttgtttgtttttgagatggagtctcgctctgtcgcccaggctggaatgctgtagcaagatttcggctcactgcaacccccgtctcccgggttcaagcgaatctcctgcctcagccttctgagtagctgggattacaggcaagcaccaccatgcctgctaattttttatttttagtagagatggggtttcatcatgttggccaggctggtctcgaactcctgacctcaagtgatccacctgccttggcctttcaaagtgctgggattacaggcatgagccaccgcacctggcccttctaacgttttttcatcatagtcccaaaaaccaatactttacaagtggtttttgaaaggcaccacttttgtggcatgttctggttgggagagggagtcacagttcctactccccccaccagctatgcttctgctctgagaaggtggttatttatacaaacatggacatactcactcccaagggctgatgagatgctgaattttctttgggggcattcattaattgtcccagctgcagcgactggagcaagtctggaagctgcctgtgctaagaccacccagctgtccctgggttctcatcctagggccttctttgcttccaggtcaggggacctgcttcaatgagaaagcaactgaattgaggctaggagaggtagggagagctgagttctgacttcacctgtgcagaactctctgcccccatgttacctggactggaacagactgtgaatatagcagaaggttccaagaactctggtgtctgacctagaagaggcacagttctctctactggaaagaaaacgatgtagccgattgcacaagggtgccaagggaagacccaggatggcccatcaaaggaacctgggggaggatgcaggaggctgaagggatgcacctggcatttctctcactgtgctcttaccgcatcagcaacccccaacttttgggcctactctgccccccatgcgtgaataccctgcttggatgctgtgcttttccggtttgtctctaagcccctttctccagggcatgttggtttccctggcctctcagtgtcctaactggagcccagagtgccttgttctgagccaggagacggctgagcactggccctccacacctaagcgtcctttacattaacttattggtcttgtataacacctggtgccattgccaagtggctgtgtcctcagctacagagctggaattgtgtggggtttagtgctaaatacttcaataaagtctgttttttgtgattggctg

SEQ ID NO: 158 - DNA, 903 bp, human
cggcggcggcgacaggaccgaggggccttagttggtgggcaagtcggggatcccagaaagagaagcgtgacccggaagcggaaacgggtgtccgtcccagctccggcctgccagtgagcttctaccatcatggacctattgttcgggcgccggaagacgccagaggagctactgcggcagaaccagagggccctgaaccgtgccatgcgggagctggaccgcgagcgacagaaactagagacccaggagaagaaaatcattgcagacattaagaagatggccaagcaaggccagatggatgctgttcgcatcatggcaaaagacttggtgcgcacccggcgttatgtgcgcaagtttgtattgatgcgggccaacatccaggctgtgtccctcaagatccagacactcaagtccaacaactcgatggcacaagccatgaagggtgtcaccaaggccatgggcaccatgaacagacagctgaagttgccccagatccagaagatcatgatggagtttgagcggcaggcagagatcatggatatgaaggaggagatgatgaatgatgccattgatgatgccatgggtgatgaggaagatgaagaggagagtgatgctgtggtgtcccaggttctggatgagctgggacttagcctaacagatgagctgtcgaacctcccctcaactgggggctcgcttagtgtggctgctggtgggaaaaaagcagaggccgcagcctcagccctagctgatgctgatgcagacctggaggaacggcttaagaacctgcggagggactgagtgcccctgccactccgagataaccagtggatgcccaggatcttttaccacaacccctctgtaataaaagagatttgacactaaaaaaaaaaaaaaaaaaaaaaa

SEQ ID NO: 159 - DNA, 3665 bp, human
cagaaaaaactcagggcaaggttggccttggctcataagaccttttcaaactttattgagtcaatggttctagagaaagagaacacccatgaacgttccccaagttctcccaagggcgagaaggggaagagcaggctgcgccagggttcctggcgggcgtttctgaaaagcaaagatgccggaagccccaaaaagcccaccctagtgagtctgcctctaggacccgaagttctctccccagcagagactgacagccactgtgaggaacgggcggaggacaaagagggctatgtttttagcgatcactgggcaccgccacttgcctccacacctttgtcctccagtttagtttctccagaacacaggaggaaaagtgaaccgaccatcaagtgcacagccacccaggaaggcgacgctaaaccaagatgagcagaaggaagagagcagggaaggaggccagggtccgcgcggcttgggcacagtgccctggctcagggaccttcctgggagtgagaaccacatgccctgggaagaaccagcaggtgagaagcccagttgctctcacagtcagaaggcgttccacatggagcctgcccagaagccctgcttcaccactgacatggtgacatgggccctcctctgcatctctgcagagactgtgcgtggggaggctccttcacagcctaggggcatccctcaccgctcgcccgtcagtgtggatgacctgtggctggagaagacacagagaaagaagttgcagaagcaggcccacgtcgaaaggaggctgcacataggggcagtgcacaaagatggagtcaagtgctggagaaagacgatcattacctctccagagtctttgaatctccctagaagaagccatccactctcccagagtgctccaacgggactgaaccacatgggctggccagagcacacaccaggcactgccatgcctgatggagctctggacacagctgtctgcgctgacgaagtggggagcgaggaggacctgtatgatgacctgcacagctccagccaccactacagccaccctggagggggtggggagcagctggctatcaatgagctcatcagcgatggcagtgtggtctgcgctgaagcactctgggaccatgtcaccatggacgaccaggagctgggcttcaaagctggggacgtcatcgaagtgatggatgccaccaacagagagtggtggtggggccgggtcgccgatggcgagggctggtttccagccagcttcgttcggctgagggtgaatcaggacgagcccgcggatgacgacgcccctctggccgggaacagcggagcggaggacggcggggcggaggcgcagagcagcaaggaccagatgcggaccaacgtcatcaacgagatcctcagcactgagcgggactacatcaagcacctgcgcgacatctgcgagggctacgtccggcagtgccgcaagcgcgcagacatgttcagcgaggagcagctgcgtaccatcttcgggaacatcgaggacatctaccgctgccagaaggccttcgtgaaggccctggagcagaggttcaaccgcgagcgcccacacctgagcgagctgggtgcctgcttcctggagcatcaagccgacttccagatctactcggagtactgcaataaccaccccaacgcctgcgtggagctctcccggctcaccaagctcagcaagtacgtgtacttcttcgaggcctgccggctgctgcagaagatgattgacatctccctggatggcttcctgctgactccggtgcagaagatctgcaagtaccctctgcagctggccgagctgctcaaatacacgcacccccagcacagggacttcaaggatgttgaagccgccttgcatgccatgaagaacgtggcccagctcatcaacgagcggaagcggagacttgagaacatcgacaagattgctcagtggcagagctccatagaggactgggagggagaagatctcttggtcaggagctcagaactcatctactcgggggagctgactcgagttacacagcctcaagccaaaagccagcagcgaatgttctttctctttgaccaccagctcatctactgtaagaaggacctgctccgccgcgacgtgttgtactacaagggccggctggacatggacggcctggaggtggtggacctggaggacgggaaggacagagacctccatgtgagcatcaagaacgccttccggctgcaccgtggcgccacaggggacagccacctgctgtgcaccaggaagcctgagcagaagcagcgctggctcaaggcctttgccagggagagggagcaggtgcagctggaccaggagacaggcttctccatcactgaactgcagaggaagcaggccatgctgaatgccagcaagcagcaggtcacagggaagcccaaagctgttggccggccctgctacctgacgcgccagaagcacccagccctgcccagcaaccggccccagcagcaggtcctggtgctggcggagccaggcgcaagcatctaccttctggcacagcatcagccggctggcacccttccgcaagtgaactggtccctgcctgacagcacctgctgggccttcctgccagtggcccccagtttttcttccccgaggcccactcggcctggccttcctctgcctgcaagtgagcagggatgggctggggagttgcttgtgccaccaagacgtgccaggtctgtactcctgttgtctttttccctgctcctggtgccctgaagagaccagcaagggggcagaccccgcactcgccacaccgccgctgcagcttgggccccatccgccctctggacctgtgtagggcctcactgctggagcggggaaaccgcagctcagcccaggcccagctggggagaaggcgctacctgcgtgggaccctcttctctggaaacctaatcctcctttcatttcctctgggcaggactctctggccttctgtggcctgcaatgccaggccatgtgcccctctgccctctagttctccaagtccccagcccggccagtggtgccaggcagcttgccacttgggagggcagaagccaggaattccacacccttgtgttgcgcccggagcccgcccttcgcctcccagcccctcaagacaccgctggctgctggacaccctcttcacttgtgtgtgtgtgtgtagcggaaaaggacaagacggtgcagtcggctgcatactcccagtcgggagtgtggtcagtctgcctgctgctgtgcggtagctccagaaccacctcgttcctggttttgtttggattttggcatcttgtttttctaacaacaaacaatggagaaaaagaattgattcttagtgacacagaagattgccttacgctcgtgagcgtgagaagccataagagagagaccgaattctgtggctcagcacacaggactgacccacagcccaggcagcgggtgtgtggagatggcgccctgtcctgccaaggggcgccaggagcagagccagggcctggcgagctggcgtggagcccacaggattcagcagcatggacagtcactcttgcactattccttctccaagccagaaaccacatttaatttcataaataaatttatgaaaagtaacctggctgct

SEQ ID NO: 160 - DNA, 4156 bp, human
  misc_feature (1121)..(1121): n is a, c, g, or t
cccactatgttggccaggatggtcttgatttcttgacctcgtgttctgcccgcctctacctcccaaagtgccgggattacaggcgtgactgctgtgcccggccccagcatcacttttatagctttctgtgcctcttcctctgggccttggtgtatgaagccacttgcctttctctgttgggaagcgagcagaatcagattgctactcatgatgcagtccgggcagggcatactgtcacctttggctgtggacacagttgtcaggataggggagaagccctttaggtccgtcttcttgacacagccctcctacctggttacgctggtgctttcgcttggtttagacaaccaagacacttgagaattatgctgtcctcagaatgtctgatgaaaagaacagattcactttttggacacaatgcccattagccatctttggcagtgtttctgatcaaaggttccccatgcctgctctaggaaagtaaacttttttcagaataaatcctcaaatggattactgagtagtctttgcaccattcccatcagcctaatcagactgaatggtcacgctcagtgcaaaaagctgttttgctgttaggatgtttcagtgtttcttgtctttcctggaacagttcagttgtttaaatttagtaattcaatcctgaccagtgtaaacccacttaattattgcagcctaaagaattcagctacttctactcttcataaatgtgcccaagtaaatatgtgtttttaatattcaaccctggaaaattagtaattcagatgataaaagctcatgttttggtgtctttgtactcagattgtgaacaggcatatttcactgatttagacttagtatacttgatgagaatgctcaggttgaagagatagttctgtcagcaatccaacatctatagcaatgtggaaaaagtaatcaactcatatttcacgaatttgatgtatgttgtgatttagagggcatgagataaagtttatatttgaactgtgtggggtagggggaagaagaggttgcttaagcaaatgggggggtgattgaggaacaagatgtctctaagatgagaagttattttcttgcatcatagaagcactctythyacccgngagtgattgtgttaactataaatcatttatatctgtacattaaagcagattccctcaattaggcaaatttggttagccaagcccaagttattgtttgtacttgaaagtaataaagctgcatttccttaaaaatatattctgtagttaagactttgtcttgctttccggaattcctgtttttcttttcctctagagacctcggcttgcaactggatcaaacgctgtcgaaaggatgtaaataggcagagcaactgttaccaagaaggccaccacccccacccaaaggcagtgaggagtgtggggcttcgtctgggctcccccgagtctcaacagtaatcaacagtcaggtgttgattgcaacttttcaaggtcagccaccgggagtagcctattccctctaggaaccttggagggcataccttgctgggactcaacttggctgagaaatgcacaagatgccaaaggaggaaggattatagggggcgtgtgtgtgacccccaagaccgatcttccgctatcaccctaatctccggttccccgctacccgggcgggggtgagtatgtgacatgtgcctaactctcagcagcaacttcggcagcaggtgtcgatcctaactaagcaggagctgcggctgccgggtgtgccctcaccaagccatgcgagccccgggcgcgcttctcgcccgcatgtcgcggctactgcttctgctactgctcaaggtgtctgcctcttctgccctcggggtcgcccctgcgtccagaaacgaaacttgtctgggggagagctgtgcacctacagtgatccagcgccgcggcagggacgcctggggaccgggaaattctgcaagagacgttctgcgagcccgagcacccagggaggagcagggggcagcgtttcttgcgggaccctcctgggacctgccggcggccccggaccgtgacccggctgcaggcagaggggcggaggcgtcgacagccggacccccgggacctccaaccaggccacctgtcccctggaggtggaaaggtgctcggggtcaggagccttctgaaactttggggagagggaaccccacggccctccagctcttccttcagatctcagaggaggaagagaagggtcccagaggcgctgtcatttccgggcgtagccaggagcagagtgtgaagacagtccccggagccagcgatcttttttactgtccaaggagagccgggaaactccagggttcccaccacaagcccctgtccaagacggccaatggactggcggggcacgaagggtggacaattgcactcccgggccgggcgctggcccagaatggatccttgggtgaaggaatccatgatcctgggggtccccgccggggaaacagcacgaaccggcgtgtgagactgaagaaccccttctacccgctgacccaggagtcctatggagcctacgcggtcatgtgtctgtccgtggtgatcttcgggaccggcatcattggcaacctggcggtgatgtgcatcgtgtgccacaactactacatgcggagcatctccaactccctcttggccaacctggtcttctgggactttctcatcatcttcttctgccttccgctggtcatcttccacgagctgaccaagaagtggctggtggaggacttctcctgcaagatcgtgccctatatagaggtcgcttctctgggagtcaccactttcaccttatgtgctctgtgcatagaccgcttccgtgctgccaccaacgtacagatgtactacgaaatgatcgaaaactgttcctcaacaactgccaaacttgctgttatatgggtgggagctctattgttagcacttccagaagttgttctccgccagctgagcaaggaggatttggggtttagtggccgagctccggcagaaaggtgcattattaagatctctcctgatttaccagacaccatctatgttctagccctcacctacgacagtgcgagactgtggtggtattttggctgttacttttgtttgcccacgcttttcaccatcacctgctctctagtgactgcgaggaaaatccgcaaagcagagaaagcctgtacccgagggaataaacggcagattcaactagagagtcagatgaactgtacagtagtggcactgaccattttatatggattgggcattattcctgaaaatatctgcaacattgttactgcctacatggctacaggggtttcacagcagacaatggacctccttaatatcatcagccagttccttttgttctttaagtcctgtgtcaccccagtcctccttttctgtctctgcaaacccttcagtcgggccttcatggagtgctgctgctgttgctgtgaggaatgcattcagaagtcttcaacggtgaccagtgatgacaatgacaacgagtacaccacggaactcgaactctcgcctttcagtgccatacgccgtgaaatgtccacttttgcttctgtcggaactcattgctgaaggacagtacttggttgggtcagatttatttgtttgattttcatatcccgtgaaagtttttaattcatatttttccttatagggaaaaatgcaaaaaagaaacaataaagaaagaaatattaactactgtagaactgattttacaaattaatatttgtgctttgaaaaaaagtttctatttagttatttaagaagaatgagaaggccaatagttttagattattttatctggtatggtgctaatattttatttgaaaaaagttactgcaacttaacttaaaattgctaacgttttttcttcttttaaaaatacaattattgtatattaattatagcaatgtgattttgtaggttattttatatttgagttgtgattgaaagtatgttgtatatggtattgtgagatgatttgtacttggaagcattcacaaagtagcaccaaataaattacactttattctttaatgtcattgtcaatctacttttaaccaatattcaataaatcttctaattgccttaaaaaaaaaaaaaaaaaa

SEQ ID NO: 161 - DNA, 386 bp, human
tatttggacttggctttgatgagtatctgacaaaccctgcagacactagtacaatttgatcgtaaacaaagtccttgccagcatagtccagcaaattctgataaaacacatacaaaagttaagagacagctcgatttcatcttcctcccaacacctgcaactgtttccagattttctgtgtagtcttctttgtgctttcagttcagtaaaaattagaaaggataacaaacttgtaaagtcagatacctaattgtacaaaattgactagaccatggagaagggggaagcatcattttacaaaatattgttaagatcaccagcattaatttaaattattttcctttctggacttccaagtccacttggcaattttacttaggaaaata

SEQ ID NO: 162 - DNA, 2912 bp, human
gcagacacacacggacacacagagacaccagacacacatatacacatgcacacacagatgcacacacatgcacacacatgcacagagacacacagatgcacacacacacgatatgcagaaaaaaatatgcactaactaacatccaggcggccatgggcctctcggatccagctgcacagcccctgctgggaaatggctctgccaacatcaagctggtgaaaaatggggagaaccagctccgtaaggctgcagagcaagggcagcaggaccccaacaaaaacctgagccccactgcagtcatcaacataacttctgagaagttagagggtaaagagccccacccacaggattcctcgagctgtgagattttaccctcccagcccaggagaactaagagcttcctaaattactatgcagatctggaaacctcagccagagaactagagcagaaccgaggcaatcaccatgggactgcggaagagaaatcccagccagtccagggccaggcctccaccatcattgggaatggcgatttgctgctgcagaaaccaaacagaccccagtccagccctgaagacggccaagtagccacagtgtcatccagcccagaaaccaagaaggatcatccgaaaacaggggccaaaaccgactgtgcactgcaccggatccagaacctggcaccgagcgatgaggagtccagctggacaacgttgtcccaagacagtgcctcacccagctccccggatgaaacagatatatggagtgatcactcatttcagactgatccagatttgccgcctggctggaaaagagtcagtgacattgccgggacctattattggcacatcccaacaggaacgactcagtgggaacggcccgtctccatcccagcagatctccagggttctaggaaagggtcacttagttctgtaacgccatctcccaccccagagaacgagaaacagccatggagtgattttgctgttctgaatgggggaaagattaatagtgacatttggaaggatttgcatgcagccactgttaacccggaccccagtttaaaagagtttgaaggagcaaccctacgctatgcatctttgaaactcagaaatgccccacaccctgatgatgatgattcttgtagtatcaacagtgacccagaagccaagtgttttgctgtgcgttctctgggatgggtagagatggcagaagaggacctcgcccccggtaaaagtagtgttgcggtcaacaactgcatcaggcaactttcctactgcaaaaatgacatccgagacacagtcgggatttggggagaggggaaagacatgtacctgatcctggagaatgacatgctcagcctggtggaccccatggaccgcagcgtctggcactcgcagcccatcgtcagcatccgcgtgtggggcgtgggccgcgacaatggccgggattttgcttatgtagcaagagataaagatacaagaattttgaaatgtcatgtatttcgatgtgacacaccagcaaaagccattgccacaagtctccacgagatctgctccaagattatggctgaacggaagaatgccaaagcgctggcctgcagctccttacaggaaagggccaatgtgaacctcgatgtccctttgcaagtagattttccaacaccaaagactgagctggtccagaagttccacgtgcagtacttgggcatgttacctgtagacaaaccagtcggaatggatattttgaacagtgccatagaaaatcttatgacctcatccaacaaggaggactggctgtcagtgaacatgaacgtggctgatgccactgtgactgtcatcagtgaaaagaatgaagaggaagtcttagtggaatgtcgtgtgcgattcctgtccttcatgggtgttgggaaggacgtccacacatttgccttcatcatggacacggggaaccagcgctttgagtgccacgttttctggtgcgagcctaatgctggtaacgtgtctgaagcggtgcaggccgcctgcatgttacgatatcagaagtgcttggtagccaggccgccttctcagaaagttcgaccacctccaccgccagcagattcagtaaccagaagagtcacaaccaatgtaaaacgaggggtcttatccctcattgacactttgaaacagaaacgccctgtcaccgaaatgccatagctgcacatgcaaaaggactcggctatttacctgaagattgactagctacactaaagaaaatgaactccgccatccgaccttccatccagttgctgatgctttgtcttcagagaatttacccttaaccaagcagtgttagacaagcatgttctctcgtcttgccaccatcatgtgatatgaaaagaagcatgaataattttttttgctgtaagttacatcatgcgcagtggaaggtctttttcttattgtaaatattgtgaacattacttaacttcacacacacacagagaagagtctggccccacccctcctagtgaactaacgctgcgtccttggaatgaatgatgcgtgagttagtttcactgtcttcttggctggacctgtcacaagcaacctttaagtcctacagcactttgccctgttttcaacattggagtaggcactgcatagcagataccattgaattgctgtaaaaataggatggcgagtttgtgttttaatttttcataaaattgaacctgttggttgacaaaattggctgttggcatcagtatagaaaccaactggcagctttccctgacaagctctttgacacatggacaccatttcatgtctacagctgtttgtgggatgttggaaaaaaatgaaacttcaaaattgatgaaaaactaaattcgaggaattaaaatcgaacaaaacataaaaaaaaaaaaaaaa

SEQ ID NO: 163 - DNA, 1665 bp, human
ggcacgaggagcaggcgctcttggctcggcgcggcccgctgcaatccgtggaggaacgcgccgccgagccaccatcatgcctgggcacttacaggaaggcttcggctgcgtggtcaccaaccgattcgaccagttatttgacgacgaatcggaccccttcgaggtgctgaaggcagcagagaacaagaaaaaagaagccggcgggggcggcgttgggggccctggggccaagagcgcagctcaggccgcggcccagaccaactccaacgcggcaggcaaacagctgcgcaaggagtcccagaaagaccgcaagaacccgctgccccccagcgttggcgtggttgacaagaaagaggagacgcagccgcccgtggcgcttaagaaagaaggaataagacgagttggaagaagacctgatcaacaacttcagggtgaagggaaaataattgatagaagaccagaaaggcgaccacctcgtgaacgaagattcgaaaagccacttgaagaaaagggtgaaggaggcgaattttcagttgatagaccgattattgaccgacctattcgaggtcgtggtggtcttggaagaggtcgagggggccgtggacgtggaatgggccgaggagatggatttgattctcgtggcaaacgtgaatttgataggcatagtggaagtgatagatctggcctgaagcacgaggacaaacgtggaggtagcggatctcacaactggggaactgtcaaagacgaattaacagagtcccccaaatacattcagaaacaaatatcttataattacagtgacttggatcaatcaaatgtgactgaggaaacacctgaaggtgaagaacatcatccagtggcagacactgaaaataaggagaatgaagttgaagaggtaaaagaggagggtccaaaagagatgactttggatgagtggaaggctattcaaaataaggaccgggcaaaagtagaatttaatatccgaaaaccaaatgaaggtgctgatgggcagtggaagaagggatttgttcttcataaatcaaagagtgaagaggctcatgctgaagattcggttatggaccatcatttccggaagccagcaaatgatataacgtctcagctggagatcaattttggagaccttggccgcccaggacgtggcggcaggggaggacgaggtggatgtgggcgtggtgggcgcccaaaccgtggcagcaggaccgacaagtcaagtgcttctgctcctgatgtggatgacccagaggcattcccagctctggcttaactggatgccataagacaaccctggttcctttgtgaacccttctgttcaaagcttttgcatgcttaaggattccaaacgactaagaaattaaaaaaaaaaaagactgtcattcataccattcacacctaaagactgaattttatctgttttaaaaatgaacttctcccgctacacagaagtaacaaatatggtagtcagttttgtatttagaaatgtattggtagcagggatgttttcataattttcagagattatgcattcttcatgaatacttttgtattgctgcttgcaaatatgcatttccaaacttgaaatataggtgtgaacagtgtgtaccagtaaaaaaaaaaaaaaaaaaaaaaaaaaaaaaaaaaaaaaaa

SEQ ID NO: 164 - DNA, 520 bp, human
tttttcaattagacaacttttactaaatgagaaaactacatttaaaatgtgctttaaaacaaaacggaattagaaaaaaagacatatgcattttaaagaacttttgcactgtgctgaaaatgaaatatctcttgcagtaagtaatacaatgtgccaattcataaaatgtaagttaacaggtttctcaatttaacattttcaaagacgatattaaggtcaaaaatgtcacatctatggtagcacatatagaagggcattatagatatgatgtccatccctatgaagcttacaaatttgacaatgctcaataaaagcttttagaatcacatccaatagtgtcacagtcaaagaatcacaaatctgtgtcctgtaagttctctccttctaaaatcttcatgttaacttttctactcattgccatttgttaatactaacccttaaaaaaaagaaataggaaaagaaaggctgcaataaacttgatcaggtacagaaattattgctactatacttcactacaaag

SEQ ID NO: 165 - DNA, 2012 bp, human
tctgaagcgaatcagtgggaagtggcctacagtgggtcggctaccgaatacaccttcacccacttgaaaccaggcactttgtacaaactccgagcatgctgcatcagtaccggcggacacagccagtgttctgaaagtctccctgttcgcacactaagcattgcaccaggtcaatgtcgaccaccgagggttttgggtagaccaaagcacaaagaagtccacttagagtgggatgttcctgcatcggaaagtggctgtgaggtctcagagtacagcgtggagatgacggagcccgaagacgtagcctcggaagtgtaccatggcccagagctggagtgcaccgtcggcaacctgcttcctggaaccgtgtatcgcttccgggtgagggctctgaatgatggagggtatggtccctattctgatgtctcagaaattaccactgctgcagggcctcctggacaatgcaaagcaccttgtatttcttgtacacctgatggatgtgtcttagtgggttgggagagtcctgatagttctggtgctgacatctcagagtacaggttggaatggggagaagatgaagaatccttagaactcatttatcatgggacagacacccgttttgaaataagagacctgttgcctgctgcacagtattgctgtagactacaggccttcaatcaagcaggggcagggccgtacagtgaacttgtcctttgccagacgccagcgtctgcccctgaccccgtctccactctctgtgtcctggaggaggagccccttgatgcctaccctgattcaccttctgcgtgccttgtactgaactgggaagagccgtgcaataacggatctgaaatccttgcttacaccattgatctaggagacactagcattaccgtgggcaacaccaccatgcatgttatgaaagatctccttccagaaaccacctaccggatcagaattcaggctataaatgaaattggagctggaccatttagtcagttcattaaagcaaaaactcggccattaccacccttgcctcctaggctagaatgtgctgctgctggtcctcagagcctgaagctaaaatggggagacagtaactccaagacacatgctgctgaggacattgtgtacacactacagctggaggacagaaacaagaggtttatttcaatctacagaggacccagccacacctacaaggtccagagactgacggaattcacatgctactccttcagaatccaggcagcaagcgaggctggagaagggcccttctcagaaacctataccttcagcacaaccaaaagtgtcccccccaccatcaaagcacctcgagtaacacagttagaaggaaattcatgtgaaattttatgggagacggtaccatcaatgaaaggtgaccctgttaactacattctgcaggtattggttggaagagaatctgagtacaaacaggtgtacaagggagaagaagccacattccaaatctcaggcctccagaccaacacagactacaggttccgcgtatgtgcgtgtcgtcgctgtttagacacctctcaggagctaagcggagccttcagcccctctgcggcttttgtattacaacgaagtgaggtcatgcttacaggggacatggggagcttagatgatcccaaaatgaagagcatgatgcctactgatgaacagtttgcagccatcattgtgcttggctttgcaactttgtccattttatttgcctttatattacagtacttcttaatgaagtaaacccaacaaaactagaggtatgaattaatgctacacattttaatacacacatttattcagatactcccctttttaaagcccttttgttttttgatttatatactctgttttacagatttagctagaaaaaaaatgtcagtgttttggtgcacctttttgaaatgcaaaactaggaaaaggttaaactggatttttttttttaaaaaaaaaaaaaaaaaaaaaaaaaaaaaaaaaaaaaaaaa

SEQ ID NO: 166 - DNA, 1892 bp, human
gcaccgggaaaataacaatcgtatttcaggttgaaagctcctattactgctgggttttggaggctgcgataaaatcttcatcgacgtgaaggtaccttctgggttggcttgggtcgtaagtcctaagatgggggccgtccttccctgggggcagggacgtagggaaccaggcggtggggagggagaaaggagcgacgaggtcagaggaaaccttgggtttccaaggctcctggggcaccaaagggcttcccgcagtcggggaattgagccctggggaggagccttttgcgagaacgtgagcgcgccccaacacgcctcagacctcgtaaacccacttggcaaagaccggggaagcggctggcggaccgactgcggtgaactcaagaaattaacctgcgctgcaactaaacgggctgccgccctttcacactcacctcgagcgaccgagatagagaaagctcccgaaccggccgcggggggacttggctccaccctcccgtcccgggagaagaggacaaaaaggggagatggacttggaatggccccgcccttcacagcgctccaatccttggaaaccaaacctcctctccaagcctccacgtctagaagggacaaaggcagcgaggagatccagagaccgacggggagatggtggctttcaggcttctggtgtgggtgcatgggggaaaggtacaatggttaactttccatcaaaaatacggcaccacacgatggtcttgagaagacacactcggtcttctggtttagaagcaaattgacttcctgaagctgtgaagcgaactatcgcaaaactctcttgcttcttgaatgtgggggcgatacaaattcaattaatgatgccatacacgtaatcttttcgactttttagaagtcacaaacgctttaactctccagtgaaaataattgaaagaggttaaacataaggggaatgggctttttttttttcttgtttttatttgggacaatttttcaaatgataaaactgtataaatacaagctgggtcagtcaaggaaagcgctgtggctgaagattttcgtaaaaaccttagtaaacgtggcatttaagtaactaattatgctttgccattagcagaccattaagataaacaggagaaagttcacactcctgctatttcgttccctaagaatagtcacaaagataataccaggctagttggtgggttatcttctccattaggagggttaatgtttaaatttgttaattaaaatacaaaaaatttggtttcctacacagccaacgttgtgagggaagtctcacggggacatcctgactccttgaaatttaccttttgttactttatcctgtggcattatcccctggagtcatatagggtttcaagactgttaatgttgcagggaatgtgagtgaatatgttagaagtctggactttcttctcccttatcataggtgactggcatacacactcctcataaagagaagttatggctcatcaaaagagtgactttatgagcattaatagaataataaatcttgcacttttagttcaagaaacagtgaagtcctataatcagagtgacccacgcaaatatgatccattcacttgcccaactctgacaggatacggatagtctataaatcattttagtttttaaaaccttaaaaaaggaaggcacccaaatctcccaaaggaaggtgtttatggggggaaagggacttctagcaaacctgcaggaagagatcatggaaaaacgaacagtcggtccagaagctgaattagatagactttccaccgaaacaagaatggatagatgttccaatgtcattgtttcagtatttatgttctatcatttaaaaagagaaaagtcttcctgcttcctgaaagctatac

SEQ ID NO: 167 - DNA, 6586 bp, human
ctggggagccggcgctggaggtggtgagtggcgtggggactgtgtcgagggggtccccaaggtgccggaccctgcggaggggcgaagtttcggcactggggagggcgtgcggacgctttccctacaggcgaccactgctctgcgggcgggtggtcttagctccagtcccccattcagttcctcagcattccaggtcggcggcgaaggggtccccgaacgaagggcgcaaggcagcgtctctgctgggaccgggaagccggacttcagggcctctcggcccgtgggcttctccccgagtctccccgagtcggttggcattaagagtttagcagatactttcagaaatggatacataagaaatggctggaaatcaaatgaatgtccaaagaagagcttagggtcttagtaacattcttttttaaaataactgtctgccaaaatgtcattacacagtactcataatagaaataacagcggtgatattcttgatattccttcttcccaaaatagttcatcactgaatgccctcacccacagtagccgacttaagctgcatttgaagtcggatatgtcagaatgtgaaaatgatgatccattattgagatctgcaggtaaagtcagagacataaatagaacttatgttatttctgccagtagaaaaacagcagacatgccccttacccctaatcctgtaggtagattggcacttcagaggagaactacaaggaacaaagaatcatctttgcttgttagtgagttggaagacacaactgaaaaaacagcagaaacacgtcttacattacaacgtcgtgctaaaacagattctgcagaaaagtggaaaacagctgaaatagattctgtcaaaatgacactgaatgtgggaggtgaaacagaaaataatggtgtttctaaggaaagtagaacaaatgtaaggattgtaaataatgctaaaaactcttttgttgcctcttctgtacctttagatgaagatccacaggtcattgaaatgatggctgataagaaatacaaagaaacattttctgcccccagtagagcaaatgaaaatgttgcacttaagtactcaagtaatagaccacccattgcttccctgagtcagactgaagttgttagatcaggacacttgacaacgaaacctactcagagcaagttggatatcaaagtgttgggaacaggaaacttgtatcatagaagtattgggaaggaaattgcaaaaacttcaaataaatttgggagcttagaaaaaagaacacctacaaaatgtacaacagaacacaaactgacaacaaagtgcagcctgcctcagcttaagagcccagctccatcaatactgaagaatagaatgtctaaccttcaagttaaacaaagaccaaaaagttcctttcttgcaaataaacaggaaagatccgcagaaaatacaattcttcccgaagaagaaactgtagttcagaacacctctgcaggaaaagaccccttaaaagtagagaatagtcaagtgacagtggcagtacgcgtaagacctttcaccaagagagagaagattgaaaaagcatcccaggtagtcttcatgagtgggaaagaaataactgtggaacaccctgacacgaaacaagtttataattttatttatgatgtttcattctggtcttttgatgaatgtcatcctcactacgctagccagacaactgtctatgagaagctagcagcaccactcctagaaagagccttcgaaggcttcaatacctgtctttttgcttatggtcagactggctctggaaaatcatatacgatgatgggatttagtgaagaaccaggaataattccaagattttgtgaagatcttttttctcaagtagccagaaaacaaacccaagaggtcagctatcacattgaaatgagcttctttgaagtatataatgaaaaaattcacgaccttctggtttgtaaagatgaaaatgggcagagaaagcaaccactgagagtgagggaacatcctgtttatggaccatatgttgaagcactgtcaatgaacattgtcagttcttacgctgatatccagagttggctagaattgggaaataaacaaagagctactgctgctactggtatgaatgataaaagttcccgatctcattcagttttcaccctggtgatgacccagaccaagacagaatttgtggaaggggaagaacacgatcacagaataacaagtcgaattaacctaatagatctggcaggcagtgagcgctgctctacggctcacactaatggagatcgactaaaggaaggtgtgagtattaataagtccttgctaactttgggaaaagttatatctgcactttcggaacaagcaaaccaaaggagtgtttttattccttatcgtgaatctgttcttacatggctgttaaaagaaagtctgggtggaaattcaaaaactgcaatgattgctacgattagtcccgctgccagcaacatagaagaaacattaagcacacttagatatgctaaccaagcccgtttaatagtcaacattgctaaagtaaatgaagatatgaacgctaagttaattagagaattgaaggcagaaattgcaaagctaaaagctgctcagagaaacagtcggaatattgaccctgaacgatacaggctctgtcggcaagaaataacatccttaagaatgaaactgcatcaacaggagagagacatggcagaaatgcaaagagtgtggaaagaaaagtttgaacaagctgaaaaaagaaaacttcaagaaacaaaagagttacagaaagcaggaattatgtttcaaatggacaatcatttaccaaaccttgttaatctgaatgaagatccacaactatctgagatgctgctatatatgataaaagaaggaacaactacagttggaaagtataaaccaaactcaagccatgatattcagttatctggggtgctgattgctgatgatcattgtactatcaaaaattttggtgggacagtgagtattatcccagttggggaagcaaagacatatgtaaatggaaaacatattttggaaatcacagtattacgtcatggtgatcgagtgattcttggtggagatcattattttagatttaatcatccagtagaagtccagaaaggaaaaaggccatctggaagagatactcctataagtgagggtccaaaagactttgaatttgcaaaaaatgagttgctcatggcacagagatcacaacttgaagcagaaataaaagaggctcagttgaaggcaaaggaagaaatgatgcaaggaatccagattgcaaaagaaatggctcagcaagagctttcttctcaaaaagctgcatatgaaagcaaaataaaagcactggaagcagaactgagagaagagtctcaaaggaaaaaaatgcaggaaataaataaccagaaggctaatcacaaaattgaggaattagaaaaggcaaagcagcatcttgaacaggaaatatatgtcaacaaaaagcgattagaaatggagacattggctacaaaacaggctttagaagaccatagcatccgccatgcaagaattctggaagctttagaaactgaaaagcaaaaaattgctaaagaagtacaaattctacagcagaatcggaataatagggataaaacttttacagtgcagacaacttggagctctatgaaactctcaatgatgattcaggaagccaatgctatcagcagcaaattgaaaacatactatgtttttggcagacatgatatatcagataaaagtagttctgacacttctattcgggttcgtaacctgaaactaggaatctcaacattctggagtctggaaaagtttgaatctaaacttgcagcaatgaaagaactttatgagagtaatggtagtaacaggggtgaagatgccttttgtgatcctgaagatgaatgggaacccgacattacagatgcaccagtttcttcactttctagaaggaggagtaggagtttgatgaagaacagaagaatttctggttgtttacatgacatacaagtccatccaattaagaatttgcattcttcacattcatcaggtttaatggacaaatcaagcactatttactcaaattcagcagagtcctttcttcctggaatttgcaaagaattgattggttcttcgttagatttttttggacagagttatgatgaagaaagaactatagcagacagcctaattaatagttttcttaaaatttataatgggctatttgccatttccaaggctcatgaagaacaagatgaagaaagtcaagataacttgttttcttctgatcgagcaatccagtcacttactattcagactgcatgtgcttttgagcagctagtagtgctaatgaaacactggctgagtgatttactgccttgtaccaacatagcaagacttgaggatgagttgagacaagaagttaaaaaactgggaggctacttacagttatttttgcagggatgctgtttggatatttcatcaatgataaaagaggctcaaaagaatgcaatccaaattgtacaacaagctgtaaagtatgtggggcagttagcagttctgaaagggagcaagctacattttctagaaaacggtaacaataaagctgccagtgtccaggaggaattcatggatgctgtttgtgatggtgtaggcttaggaatgaagattttattagattctggactggaaaaagcaaaagaacttcagcatgaactctttaggcagtgtacaaaaaatgaggttaccaaagaaatgaaaactaatgccatgggattgattagatctcttgaaaacatctttgctgaatcgaaaattaaaagtttcagaaggcaagtacaagaagaaaactttgaataccaagatttcaagaggatggttaatcgtgctccagaattcttaaagttaaaacattgcttagagaaagctattgaaattattatttctgcactgaaaggatgccatagtgatataaatcttctccagacttgtgttgaaagtattcgcaacttggccagtgatttttacagtgacttcagtgtgccttctacttctgttggcagctatgagagtagagtaactcacattgtccaccaggaactagaatctctagctaagtctctcctcttttgttttgaatctgaagaaagccctgatttgttgaaaccctgggaaacttataatcaaaataccaaagaagaacaccaacaatctaaatcaagcgggattgacggcagtaagaataaaggtgtaccaaagcgtgtctatgagctccatggctcatccccagcagtgagctcagaggaatgcacacccagtaggattcagtgggtgtgaatactgatgtgtaggcacttttatgaccacccatgaaagaaaaagaacacttgctcggtaattttctttatgcaggagagtttaagagaaatcagcacagatatttcaaaaaagtccatgtctttttatctttaaaatatctatttatcaaaggccagacacagtggctcacgcctgtaatcccagcactttgggaggcgggcagatcacaaggtcaggagtttgagaccggcctggccaacatggtgaaaccccgtctctactaaaaatacaaaaatttgctgggcatggtggcgcgtgcctgtaatcccagctactaggggggctgaggcaggaggatcgcttgaacctgagaggcagaggttgcagtgagccaagatcatgccactttactccagtctgagcaacagaacgagacttagtcaaaataaataaataaataagtaaataaataaataaataaaatatcttttatctttaaagtgtttaacattggtatactgtctgtagttggttcattagtcgtttataaagggttattttctcatgagtggaaacctgaacaatcagttacctttgtgcctatgccttctctctcctcagacagctgggatgtttatggtgaaatggcctgtacaagtttaactaagacaacttaacttgcattgttaatcaaaaattcttttctcaaagggttaactggttgccattttgaatagtatgttcaagggtgtagcttcctgtttctttccaaattataagtagctacctaaatatagtataattatatattaataatatggcttgctggcacagtagtttaccctgttatctgtgtttcataatgggggctgtatgaatattatttaaaactaataaaatgttgccagaattatactaaactgttggatgagattaggagatcagaggctggaccttctcttgataatgcttgttttgttaaaggtataatgaaataatttgtatatgatttgatgaagattaaagacccttattttccacagctttaaaaaaaaacctttatttatgatcaagtaataaagataatattctacttgtgggatcttacattatggaaatagtttgacgtttttgacctcaagagtatgtataatttgaagagatactttgtaactatgcttgggtgatattgagcagttcctaaagaataattcattt

SEQ ID NO: 168 - DNA, 510 bp, human
ctccagtgggcgtcttgggccccggctctattctgggctgcgggcctgggaagggctcgccgggtgccaaatgagctgtcctaactctgcggggctgcagcttcctgcatgatgctggggagcttggcgcctgacccaggatctagaaggcactctgggcaggccgcgctccgcccacgaaggtacccaaccctctgggatagatgcaggaagcgatggttaagacccattttcacccaacttctcgccgcaggtttaaccaccaaggactctgagagctggcaggtctgagtaaccctggtaacaattctcttcaccttatcaaaacctgagctaaaaccaatgcatcagctgatgatgacagcagagagtggcagggctgaggacccaaagtcatttcccaggctggcggagaataaactgccagggagaagaatgagaagacaggagacaaactgtttggaaagctaaatcttccctcttaatgaataaaggtttttgccttgtctt

SEQ ID NO: 169 - DNA, 2199 bp, human
gtcgccgctgccgggttgccagcggagtcgcgcgtcgggagctacgtagggcagagaagtcatggcttctccgtccaaaggcaatgacttgttttcgcccgacgaggagggcccagcagtggtggccggaccaggcccggggcctgggggcgccgagggggccgcggaggagcgccgcgtcaaggtctccagcctgcccttcagcgtggaggcgctcatgtccgacaagaagccgcccaaggaggcgtccccgctgccggccgaaagcgcctcggccggggccaccctgcggccactgctgctgtcggggcacggcgctcgggaagcgcacagccccgggccgctggtgaagcccttcgagaccgcctcggtcaagtcggaaaattcagaagatggagcggcgtggatgcaggaacccggccgatattcgccgccgccaagacatacgagccctaccacctgcaccctgaggaaacacaagaccaatcggaagccgcgcacgccctttaccacatcccagctcctcgccctggagcgcaagttccgtcagaaacagtacctctccattgcagagcgtgcagagttctccagctctctgaacctcacagagacccaggtcaaaatctggttccagaaccgaagggccaaggcgaaaagactgcaggaggcagaactggaaaagctgaaaatggctgcaaaacctatgctgccctccagcttcagtctccctttccccatcagctcgcccctgcaggcagcgtccatatatggagcatcctacccgttccatagacctgtgcttcccatcccgcctgtgggactctatgccacgccagtgggatatggcatgtaccacctgtcctaaggaagaccagatcaatagactccatgatggatgcttgtttcaaagggtttcctctccctctccacgaaggcagtaccagccagtactcctgctctgctaaccctgcgtgcaccaccctaagcggctaggctgacagggccacacgacatagctgaaatttcgttctgtaggcggaggcaccaagccctgttttcttggtgtaatcttccagatgcccccttttcctttcacaaagattggctctgatggtttttatgtataaatatatatatataataaaatataatacatttttatacagcagacgtaaaaattcaaattattttaaaaggcaaaatttatatacatatgtgctttttttgtatatctcaccttcccaaaagacactgtgtaagtccatttgttgtattttcttaaagagggagacaaattatttgcaaaatgtgctaaagtcaatgatttttacgggattattgacttctgcttatggaaaacaaagaaacagacacagtgcacacagaaaatattagatatggagagattattcaaagtgaaggggacacatcatatttctgcattttacttgcattaaaagaaacctctttatatactacagttgttcctatttttcccccgccccccaccgccccaccacacacatatttttaaagtttttccttttttaagaatatttttgtaagaccaatacctgggatgagaagaatcctgagactgcctggaggtgaggtagaaaattagaaatacttcctaattcttctcaaggctgttggtaactttatttcagataattggagagtaaaatgttaaaacctgttgagaggaattgatggtttctgagaaatactaggtacattcatcctcacagattgcaaaggtgatttgggtgggggtttagtaattttctgcttaaaaaatgagtatcttgtaaccattacctatatgctaaatattcttgaacaattagtagatccagaaagaaaaaaaaaatatgctttctctgtgtgtgtacctgttgtatgtcctaaacttattagaaaattttatatacttttttacatgttggggggcagaaggtaaagccatgttttgacttggtgaaaatggggttgtcaaacagcccattaagctccctggtatttcaccttcctgtccatctctcccctccctccggtatacctttatccctttgaaagggtgcttgtacaatttgatatattttattgaagagttatctcttattctgaattaaattaagcatttgttttattgcagtaaagtttgtccaaactcacaattaaaaaaaaaaaaaaaaa

SEQ ID NO: 170 - DNA, 1327 bp, human
ggtcgacgacgtggcagccgggatgcactaggcaaagccagctgggctcctgagtccggtgggtacttggagaacttactacgtctagctggaggattgtaaatgtaccaatcagcatgctgtgtctagctcaagaactcaagctccatgaggagatgtttcattgtcgagagcagtcatgatggcctgcactccacacaatgcaacagagtgaaagagcaggttctgcttctttggtgtagtcctgaagcttcctaagaaacttcacatcaggtgatggataggagcaaccctgtaaaaccagccttagactattttttaaacaggctggtgaattaccagatctccgtcaagtgcagtaaccagttcaagttggaagtgtgtcttttgaatgcagaaaacaaagtcgtggacaaccaggctgggacccagggccagctgaaggtgctgggtgccaacctctggtggccgtacctgatgcacgaacaccccgcctacctctactcgtgggaggatggtgattgctcacaccaaagccttggacccctcccagcctgtgacctttgtgaccaactccacctacgcagcagacaagggggctctgtatgtggatgtgatccgtgtgaacagctactactcttggtatcgcaactacgggcacctggagttgattcagctgcagctggccgcccagtttgagaattggtgtaagacatcacaatcccattattcagagcgcgtatggagtggaaacgcttgtagggtttcaccagtctttcccagggaactccgatgaagtgttccaacaaaatgagcgagtgaaccaagaagaggatgacattagatccaggagatacaacagaggagataatctccaggatgcctgtgaagaaagatccctggatcccaggatgattataggacaagttgttcataatccagcaggccagaagacttccagggaaactcattcaaggaggtgaaaatgatggatgactcctccaagatgaaaatggaccagccgcagtgctcacgcctgtaataccagcactttgggaggctgaggcaggcggatcacttgaggtcaggagtttgaaactagcctggccaacgtggcaaaactccatctctattaaaaatacaaaaattagccaggcatagtggtgcatgcctgtagtcccagctacttgggatgccgaggcaggaagaattgcttgaacctgggaggcagagtctgcagtgagccgagatcatgccactgcactccagcctgggtgacagagccactccgtctcaaaaaaaaaaaaaaaaaaaaaaaaaaaaaaaa

SEQ ID NO: 171 - DNA, 1869 bp, human
ggcgccgggggcgggggtgggaggcggaggcggggccggggcgccgcgggcggggcgccgggggcggggcgagtccggaggactcctcggactgcgcggaacatggcgttctggggttggcgcgccgcggcagccctccggctgtggggccgggtagttgaacgggtcgaggccgggggaggcgtggggccgtttcaggcctgcggctgtcggctggtgcttggcggcagggacgatgtgagtgcggggctgagaggcagccatggggcccgcggtgagcccttggacccggcgcgccccttgcagaggcctcccagacccgaggtgcccagggcattccggaggcagccgagggcagcagctcccagtttcttcttttcgagtattaaaggtggaagaaggtccatatctttttctgtgggtgcttcaagtgttgttggaagtggaggcagcagtgacaaggggaagctttccctgcaggatgtagctgagctgattcgggccagagcctgccagagggtggtggtcatggtgggggccggcatcagcacacccagtggcattccagacttcagatcgccggggagtggcctgtacagcaacctccagcagtacgatctcccgtaccccgaggccatttttgaactcccattcttctttcacaaccccaagccctttttcactttggccaaggagctgtaccctggaaactacaagcccaacgtcactcactactttctccggctgcttcatgacaaggggctgcttctgcggctctacacgcagaacatcgatgggcttgagagagtgtcgggcatccctgcctcaaagctggttgaagctcatggaacctttgcctctgccacctgcacagtctgccaaagacccttcccaggggaggacattcgggctgacgtgatggcagacagggttccccgctgcccggtctgcaccggcgttgtgaagcccgacattgtgttctttggggagccgctgccccagaggttcttgctgcatgtggttgatttccccatggcagatctgctgctcatccttgggacctccctggaggtggagccttttgccagcttgaccgaggccgtgcggagctcagttccccgactgctcatcaaccgggacttggtggggcccttggcttggcatcctcgcagcagggacgtggcccagctgggggacgtggttcacggcgtggaaagcctagtggagcttctgggctggacagaagagatgcgggaccttgtgcagcgggaaactgggaagcttgatggaccagacaaataggatgatggctgcccccacacaataaatggtaacataggagacatccacatcccaattctgacaagacctcatgcctgaagacagcttgggcaggtgaaaccagaatatgtgaactgagtggacacccgaggctgccactggaatgtcttctcaggccatgagctgcagtgactggtagggctgtgtttacagtcagggccaccccgtcacatatacaaaggagctgcctgcctgtttgctgtgttgaactcttcactctgctgaagctcctaatggaaaaagctttcttctgactgtgaccctcttgaactgaatcagaccaactggaatcccagaccgagtctgctttctgtgcctagttgaacggcaagctcggcatctgttggttacaagatccagacttgggccgagcggtccccagccctcttcatgttccgaagtgtagtcttgaggccctggtgccgcacttctagcatgttggtctcctttagtggggctatttttaatgagagaaaatctgttctttccagcatgaaatacatttagtctcctcaaaaaaaaaaaaca

SEQ ID NO: 172 - DNA, 3141 bp, human
cggacgcgtggggtgggagaccggagcgggagacagcggtgacaggagcagcggccgggagcccttagggaggcagacagagcctgcagccaatgccccaggagccctcggttccaaccaactgatgcccctgtgcccactggcccacgccatgcagccccagtccgttctgcacagcggctacttccacccactacttcgggcctggcagacagccaccaccaccctcaatgcctccaacctcatctaccccatctttgtcacggatgttcctgatgacatacagcctatcaccagcctcccaggagtggccaggtacggtgtgaagcggctggaagagatgctgaggcccttggtggaagagggcctacgctgtgtcttgatctttggcgtccccagcagagttcccaaggacgagcggggttccgcagctgactccgaggagtccccagctattgaggcaatccatctgttgaggaagaccttccccaacctcctggtggcctgtgatgtctgcctgtgtccctacacctcccatggtcactgcgggctcctgagtgaaaacggagcattccgggctgaggagagccgccagcggctggctgaggtggcattggcgtatgccaaggcaggatgtcaggtggtagccccgtcggacatgatggatggacgcgtggaagccatcaaagaggccctgatggcacatggacttggcaacagggtatcggtgatgagctacagtgccaaatttgcttcctgtttctatggccctttccgggatgcagctaagtcaagcccagcttttggggaccgccgctgctaccagctgccccctggagcacgaggcctggctctccgagctgtggaccgggatgtacgggaaggagctgacatgctcatggtgaagccgggaatgccctacctggacatcgtgcgggaggtaaaggacaagcaccctgacctccctctcgccgtgtaccacgtctctggagagtttgccatgctgtggcatggagcccaggccggggcatttgatctcaaggctgccgtactggaggccatgactgccttccgcagagcaggtgctgacatcatcatcacctactacacaccgcagctgctgcagtggctgaaggaggaatgatggagacagtgccaggcccaagaactagaactttaaaacgttcccggggcctcagacaagtgaaaaccaaagtaaatgctgcttttagaactgtgtcctcatgccctcttcctgctcacatgctagcggggcccagcagccctgggtggttttgccagcatgctaactcttgtaactcgcagctgcatcctatgagctctcccaagcttccccgcccctcccctgggtcagccgtgaggcccacctttgccaccctcagctctttcctctggtgtggcttcagcttgaaagcaacctggagtcgggggcacagcctttggggcctggctgggagagggtcttggagcattaggggaagaagagagcagtgggatcttggggcctgagaagccttggaacgcttctggcagcagagctgggtgtgggaatgaggcctagatcgatatccctgggttagagttgaaatttgccgcaattccactggaaggcatttcccacgaggccagaggttgccaggctgcctgaggtctcctattctactctgaaccataaacccagagaagaattactcattaaccagcataaatactgcctgaggatcaaaactcagaggcaaagagggagttcctgactgctagaggtgccaccaccacaaacactttttattcaggagatactttttgagaatctctgctctgttcctaggttcagtgctgggtcctgggaatacagcaggacagacctcagcttatctcttcatagaaattatacaaagagaattggggagacagctaagaagaaaacaaagaaataaagcagttacaaattgtgataagtgctttgaaggaaagaaggggtctgagacaacaacagggaaggggcctctcttgaaacagtagttgggaaggaggcagacatgcaccagtgatgtggtgacaggtgctctgaaggaggtcaccaggacctgacctctttgaaggatcagaaaatacttccctgaaggactgacatttgagcctagacctgaagggtgagccatcaagctaagacaattggggaagagcattccagggagagggaggagttgtgcaaaggccctggggctccttctagctggaggaatgcaaggctagcttgtctggagcactgagaggatggcctgaactgagtggagagagacagaccaggaccaaaccatgcagaggtcaagggccacattcaccttttcagagtgactcaatcaaatttgtagtttgtaaaagtattttaacagctctgcggcaaagtgcaaatgaaaagtcttgatggcatggactggagcggggacagtggggatggagaaaggggaatggattgtggatgtgtttagaaggtagattcgatgtgaaggatgaatctggcttgaccttctgggtggctgatgggccatttactgagatggggcagcctggaagaggaacagaagcagggtcggggtggagggagaatactaaacttagcttgagacattttgcaataaggaagctatatctagagtgcttatgtgactcacctaaggccactcaacaagtttgtggcagaactggattagaactgcacagaaaacagccaagctgggatttgaacccatgtagtccaactccaaggcctctgcccctaaccactgtgccataccacctcccaataatcaacagcaaaattataggtctaacaatgttttatagacacccctccatttatgtgatgggtttgcatcctgataaacccatcataagttgaaaatatgatcataagttgaaaatatgatcataagtcaaaaatgtatttaatatacctaacctaccaaacatcatagcttagcctagcctgccttaaacatgctcagaacacttacattagcctacagtgggcaaaactatccaacacaaaatctatattgtaataaagttgtaaagaattttgaataaaaattcaatatttgaaaaaaaaaaaaaaaa

SEQ ID NO: 173 - DNA, 862 bp, human
tccatgctaacgtacagttgctccgctctgctgctgattggtctgctggtataaagtaccatgaagagtccatccacgccgcttacgtccatgtgatagagaacagcaggcactatatctatatcgaaaaccagtttttcataagctgtgctgatgacaaagttgtgttcaacaagataggcgatgccattgcccagaggatcctgaaagctcacagggaaaaccagaaataccgggtatatgtcgtgataccacttctgccagggttcgaaggagacattccaaccggcggaggaaatgctctacaggcaatcatgcacttcaactacagaaccatgtgcagaggagaaaattccatccttggacagttaaaagcagagcttggtaatcagtggataaattacatatcattctgtggtcttagaacacatgcagagctcgaaggaaacctagtaactgagcttatctatgtccacagcaagttgttaattgctgatgataacactgttattattggctctgccaacataaatgaccgcagcatgctgggaaagcgtgacagtgaaatggctgtcattgtgcaagatacagagactgttccttcagtaatggatggaaaagagtaccaagctggccggtttgcccgaggacttcggctacagtgctttaggtctaaaatgactccaggtgtcgaagatccctgatctttggcaagaagatgcaaattttaaactaatctgtggtgaagcagagagagtactgggctaggaagctgggctcgtttcagctgtgcgatcctaaataagtccattcaataaagtgttatttagaactttcaaaaaaaaaaaaaaaaaaaaaaaaa

SEQ ID NO: 174 - DNA, 599 bp, human
  misc_feature (582)..(582): n is a, c, g, or t
gagtcctgatgctttgaactatggagtgagccgacatcactctgggacgattcctgtttgactgttggtgtgactatggccggatgcggaatgcccgtcgtgtgtagcgtatgatgtggtgggaccatatggggagggaacctagaagacagaaagctggacatggaagcattgacggtcagagctgtggggtaggggtgtctgaatcctcctgtcgtgattgggtacactggttgaccttgctgtggtactaaccatcctagcggatgggggatttgtcctacggtgccaggcgatagtgggtaatacggggatatatctggagggtgcggaggccgtgggattcctgttttggggtctacgtcggctggtaagtgtggaggtgggtttcccggcgtgaagtgttcattgctgtacgtgataagaggcgtgagggggtggacatggtgagggtgctgcaccactggcactttgttagagacaatgtgtgccggtgatggggaccgggcatccttgagggcttgtctactctggaggctccctgcctggacatcaagcagtggccatttcatctggagatanctgactgcaatctgtgt

SEQ ID NO: 175 - DNA, 956 bp, human
aagtaaatgcagcactagtgggtgggattgaggctatgccctggtgcataaatagagactcagctgtgctggcacactcagaagcttggaccgcatcctagccgccgactcacacaaggcaggtgggtgaggaaatccagagttgccatggagaaaattccagtgtcagcattcttgctccttgtggccctctcctacactctggccagagataccacagtcaaacctggagccaaaaaggacacaaaggactctcgacccaaactgccccagaccctctccagaggttggggtgaccaactcatctggactcagacatatgaagaagctctatataaatccaagacaagcaacaaacccttgatgattattcatcacttggatgagtgcccacacagtcaagctttaaagaaagtgtttgctgaaaataaagaaatccagaaattggcagagcagtttgtcctcctcaatctggtttatgaaacaactgacaaacacctttctcctgatggccagtatgtccccaggattatgtttgttgacccatctctgacagttagagccgatatcactggaagatattcaaatcgtctctatgcttacgaacctgcagatacagctctgttgcttgacaacatgaagaaagctctcaagttgctgaagactgaattgtaaagaaaaaaaatctccaagcccttctgtctgtcaggccttgagacttgaaaccagaagaagtgtgagaagactggctagtgtggaagcatagtgaacacactgattaggttatggtttaatgttacaacaactattttttaagaaaaacaagttttagaaatttggtttcaagtgtacatgtgtgaaaacaatattgtatactaccatagtgagccatgattttctaaaaaaaaaaataaatgttttgggggtgttctgttttctccaaaaaaaaaaaaaaa

SEQ ID NO: 176 - DNA, 1320 bp, human
gtcatgctggtgggggactcgggtgtggggaagacctgtctgctggtgcgattcaaggatggtgctttcctggcggggaccttcatctccaccgtaggcattgacttccggaacaaagttctggacgtggatggtgtgaaggtgaagctgcagatgtgggacacagctggtcaggagcggttccgcagtgttacccatgcctactaccgggatgctcatgctctgctgctgctctacgatgtcaccaacaaggcctcctttgacaacatccaggcctggctgaccgagatccacgagtacgcccagcacgacgtggcgctcatgctgctggggaacaaggtggactctgcccatgagcgtgtggtgaagagggaggacggggagaagctggccaaggagtatggactgcccttcatggagaccagcgccaagacgggcctcaacgtggacttggccttcacagccatagcaaaggagttgaagcagcgctccatgaaggctcccagcgagccgcgcttccggctgcatgattacgttaagagggagggtcgaggggcctcctgctgccgcccttgaacctggctgagctcagtcctctggaggaagccgcccagtccctagaaggctggacagagggtctccaggcccttctgactttgttgcccagtggccaacgcccgagtgtctgttttcaggagccccaggtcaagccttgtcccttcctcctcccagcaacagtcccaacaagcaggcttctgagagcccgtggccgcacactggccgccacggaaaagcagtcttctgcacgggacggggagcggcaagtggacagactttgccacggtgctctgctgccccctcctgggcacgtccaggtgagggagggctggggctggcaccacgcacagtgcctaaccctagaaaagccatgtcttcagccgcacatgctcaggcagctaagggaggacgcctgcccacgcctgggacagaaggcttcactgctaatcacatcgtgcatctgtgtgtcctgggagctgcctgctcccggcccaccctctaggaggctctggctcaaacagcaatagggtcttcctcactgaccttggaggatgcctgtggccttgtgataaaatgtgggaaatcacagaaaacaccagaaacaacaactgccagcccggcctggccacaggtgaggtctgtgatttccgagcacgctccaccttgcactcaacttggccttttgattgcacaagcctttgttttcagtcctagtgaataaagttgtgttttctggagcgtctgtctcatctgttgaaaaaa

SEQ ID NO: 177 - DNA, 3089 bp, human
aaagattccgaggtgcagaagttgtctgagtgggttggtcggcggcagtcgggccagacccaggactctgcgactttacatctttaaatggatgagatggctaccactcagatttccaaagatgagcttgatgaactcaaagaggcctttgcaaaagttgatctcaacagcaacggattcatttgtgactatgaacttcatgagctcttcaaggaagctaatatgccattaccaggatataaagtgagagaaattattcagaaactcatgctggatggtgacaggaataaagatgggaaaataagttttgacgaatttgtttatatttttcaagaggtaaaaagtagtgatattgccaagaccttccgcaaagcaatcaacaggaaagaaggtatttgtgctctgggtggaacttcagagttgtccagcgaaggaacacagcattcttactcagaggaagaaaaatatgcttttgttaactggataaacaaagctttggaaaatgatcctgattgtagacatgttataccaatgaaccctaacaccgatgacctgttcaaagctgttggtgatggaattgtgctttgtaaaatgattaacctttcagttcctgataccattgatgaaagagcaatcaacaagaagaaacttacacccttcatcattcaggaaaacttgaacttggcactgaactctgcttctgccattgggtgtcatgttgtgaacattggtgcagaagatttgagggctgggaaacctcatctggttttgggactgctttggcagatcattaagatcggtttgttcgctgacattgaattaagcaggaatgaagccttggctgctttactccgagatggtgagactttggaggaacttatgaaattgtctccagaagagcttctgcttagatgggcaaactttcatttggaaaactcgggctggcaaaaaattaacaactttagtgctgacatcaaggattccaaagcctatttccatcttctcaatcaaatcgcaccaaaaggacaaaaggaaggtgaaccacggatagatattaacatgtcaggtttcaatgaaacagatgatttgaagagagctgagagtatgcttcaacaagcagataaattaggttgcagacagtttgttacccctgctgatgttgtcagtggaaaccccaaactcaacttagctttcgtggctaacctgtttaataaatacccagcactaactaagccagagaaccaggatattgactggactctattagaaggagaaactcgtgaagaaagaaccttccgtaactggatgaactctcttggtgtcaatcctcacgtaaaccatctctatgctgacctgcaagatgccctggtaatcttacagttatatgaacgaattaaagttcctgttgactggagtaaggttaataaacctccatacccgaaactgggagccaacatgaaaaagctagaaaactgcaactatgctgttgaattagggaagcatcctgctaaattctccctggttggcattggagggcaagacctgaatgatgggaaccaaaccctgactttagctttagtctggcagctgatgagaagatataccctcaatgtcctggaagatcttggagatggtcagaaagccaatgacgacatcattgtgaactgggtgaacagaacgttgagtgaagctggaaaatcaacttccattcagagttttaaggacaagacgatcagctccagtttggcagttgtggatttaattgatgccatccagccaggctgtataaactatgaccttgtgaagagtggcaatctaacagaagatgacaagcacaataatgccaagtatgcagtgtcaatggctagaagaatcggagccagagtgtatgctctccctgaagaccttgtggaagtaaagcccaagatggtcatgactgtgtttgcatgtttgatgggcaggggaatgaagagagtgtaaaataaccaatctgaataaaacagccatgctcccaggtgcatgattcgcaggtcagctatttcccaggtgaagtgcttatggcttaaggaactcttggccattcaaaggacttttcattttgattaacaggactagcttatcatgagagcctcaggggaaagggtttaagaaaaacaactcctctttcccatagtcagagttgaatttgtcaggcacgcctgaaatgtgctcatagccaaaacattttactctctcctcctagaatgctgcccttgacatttcccattgctgtatgttatttcttgctctgttatcttttgccctcttagaatgtccctctcttgggacttgcttagatgatgggatatgaatattattagacagtaattttgctttccatccagtatgctagttcttattcgagaactatggtcagagcgtatttggatatgagtatcctttgcttatctttgtagtactgaaaatttgccgaagtaactggctgtgcagaatgtaatagaagcttttcttattcttttattcttaagtacagtatctttttacagtattctttctacatgatccttttttgtacatttaagaatattttgattatattaaacaagactgctgattttgctactttttttaaggggtcttcaagtaagtaaaacatacatcgtagctagaagaaaaatgtaccttaaatttgcatcttccctctcatacccaagctgtaaacaattgaaatattttgtcttaaatcacttggttcaatacatgcttatttgttttaaaacctgtatcatcaaactctctctctaaatttaaaatgctgttgaatatgatacttttgaggagagagtgtgctcagaacttagacgggatttggtaggccaagtatgctaagtgtacaatatattttttaattttacacctgaaacaaagaaatgtggtcactaaaaataaaagtatatatgtaggaattaatgtactcttgctttgtcaagctgtttgctatagtttccaaggtattatgttactctaactctgaaaagtgatgtaatctggtagcaatgtagtagttcaaataaaggcatttacataat

SEQ ID NO: 178 - DNA, 473 bp, human
  misc_feature (40)..(40): n is a, c, g, or t
  misc_feature (389)..(389): n is a, c, g, or t
ataccattttgagagtaattttaaagtttaatgcgagagntcgggagcacattgtatatttgaaataagtgtagtgtgtgcaaagaccattttctacctgtggataaaaatcaattcccccaaaggcctaaaagcatgaacaatgtttattttgagtaaataattaaactacatatttaacatggaaaaaattaaatgaatgtcaaaaccaaaattaagaactataagcaaagcatgcagtctctgttaacaaaacttagttgtgaaactacatttttcattttgtaaatgccattatttcatttcataaaatgtaaaaatcctcagtatcattctttacacttgatgcggcaaacacttctttcctattttcctcgtatttcctgcanaataaatctacatctcaagttccttatagttcatactttcttctcaacatatttgagaccttcaggtccaggcctattttctct

SEQ ID NO: 179 - DNA, 2570 bp, human
actattggccagttccgttcaacgaagtggttgctttttttagttccggcaatgagttgcgccggggcggcggcggctccccgcctttggcggctgcgcccgggggcccggcggtccctctcagcttatggaagaagaaccagtgtcagatttcgcagttcaggaatgactttagacaatatcagtcgggcagctgtggatcgaataatccgggtggatcatgcaggcgaatatggagcaaaccgcatctatgccgggcagatggctgtcctgggtcggaccagcgtcgggccagtcattcagaaaatgtgggatcaagaaaaggaccatttgaaaaagttcaatgagttgatggttatgttcagggtccggccaacagttctgatgcccttgtggaacgtgctggggtttgcactgggggcggggaccgccttgctcgggaaggaaggtgccatggcctgcaccgtggcggtggaagagagcatagcacatcactacaacaaccagatcaggacgctgatggaggaggaccctgaaaaatacgaggaacttcttcagctgataaagaaatttcgggatgaagagcttgagcaccatgacataggcctcgaccatgatgcagaattggctccagcctatgccgtcctgaagagcattatccaggccggatgcagagtggcgatatatttatcagaaagattataaagtgtgtccagttttgcctgtctataaaagatgatagtaatttaccaagtgacatttgcagagaaacaggtgtacagttatcgttgtacttttgtacaatgtgaattttgttaataaattataaggtttgtttttttttttttaaactctgcagtgttgatttttctctgggttgttttttctgccatgagaccaacaggtcaccagccttgttcaagttacagcaaacgaagctgggccttgtttggtctcatacttaattttcttttatatacatgtttttcttttacatgcatatatatatattttattttattttatgttttttggagacagggcctcgctcttttgtccaggccgggtcacaactcactgcagcctggacctcctagcctcaagcaatccacccacctcagccttccaagtagctgggactacaggtgtgcaccaccacagctggctaattctatttttttatagaggcgaagtctcactatgtcgccaggctggtctctaactcctgggctcagtgatcctcccgtttcgacttcccaaagtgctgggattacaggtgtgagccacttcaccaggcccattttctcctaaaacttcaaggacaaatcattaataatgtaacaggaatctttaggagaaaaaacaatttggtttactgataacaaaagataattggaaacatgagagtatttgagattggccaagcagaactatgaagtccatcaagtaagtcaaagatcatcgtttctgttttgaattgtgggtgataatgggtgggagagtgctacagtctgtatgtctgtgtctccctagaattcatacgatgaaatcttcactctcaagttgatagaaggtggggcccttgggaagtgtgaggtcatgagagtggagccctcatgaatgggatcagtgccttatgaaaggccctagagagatacctcatcctctccacagtgtgagacttcaaggggaagtatgagacttctctgaggaagcagacccttcacaagcaaaatcagccagcactttgatcacggacttcccagcctctaggactgtgagcaataaatgtttgatgtttataagccacccagactgtggtattttgttatagcagcctgaacagactaagacgggggtgttgcttccatcaaaggatgtactaagttgtggattatttgtgaaattgaattacaaccttttccttaaggtcttttaccacctcccccccaaaaaaatcccccaaaactgattcagattttcatactttaatgaaatattttataatttgcaaatttttaagtaatttatgaaaaacctagatcagtggatctcctctctggctgcccattagaatgtcctgtggagattaaacttttttttttcagtttatggaccaagagttttgatttatttagggtggagttcaggatcagaatggtttcagaagctcccaggtgattccggagtgagttggagctgcaagcccctgagctagattataagatgcttctgggaaagaaccacattttaggaatttgcttcccacccagtgccctgcatttaatcagcacctgatgacttggcaggacttgccccaccagggtctggctttgaagggtagtggacaccaggatcctttggattaatcctctgccacctctctcttttcctcaaccgagagtgaatttatgtaattgagtgaaagtctacgaatcataattgtaataaattaaggctgggcatttgtttgaaattagataggataaagccaaaggtttgaacaagttgtggatggtttgtaaaaattaatcttacaaaataaatgctgtgtgtgaacacgttgattg

SEQ ID NO: 180 - DNA, 2827 bp, human
aggatggaagtgcagttagggctgggaagggtctaccctcggccgccgtccaagacctaccgaggagctttccagaatctgttccagagcgtccgcgaagtgatccagaacccgggccccaggcacccagaggccgcgagcgcagcacctcccggcgccagtttgctgctgctgcagcagcagcagcagcagcagcagcagcagcagcagcagcagcagcaagagactagccccaggcagcagcagcagcagcagggtgaggatggttctccccaagcccatcgtagaggccccacaggctacctggtcctggatgaggaacagcaaccttcacagccgcagtcggccctggagtgccaccccgagagaggttgcgtcccagagcctggagccgccgtggccgccagcaaggggctgccgcagcagctgccagcacctccggacgaggatgactcagctgccccatccacgttgtccctgctgggccccactttccccggcttaagcagctgctccgctgaccttaaagacatcctgagcgaggccagcaccatgcaactccttcagcaacagcagcaggaagcagtatccgaaggcagcagcagcgggagagcgagggaggcctcgggggctcccacttcctccaaggacaattacttagggggcacttcgaccatttctgacaacgccaaggagttgtgtaaggcagtgtcggtgtccatgggcctgggtgtggaggcgttggagcatctgagtccaggggaacagcttcggggggattgcatgtacgccccacttttgggagttccacccgctgtgcgtcccactccttgtgccccattggccgaatgcaaaggttctctgctagacgacagcgcaggcaagagcactgaagatactgctgagtattcccctttcaagggaggttacaccaaagggctagaaggcgagagcctaggctgctctggcagcgctgcagcagggagctccgggacacttgaactgccgtctaccctgtctctctacaagtccggagcactggacgaggcagctgcgtaccagagtcgcgactactacaactttccactggctctggccggaccgccgccccctccgccgcctccccatccccacgctcgcatcaagctggagaacccgctggactacggcagcgcctgggcggctgcggcggcgcagtgccgctatggggacctggcgagcctgcatggcgcgggtgcagcgggacccggttctgggtcaccctcagccgccgcttcctcatcctggcacactctcttcacagccgaagaaggccagttgtatggaccgtgtggtggtggtgggggtggtggcggcggcggcggcggcggcggcggcggcgaggcgggagctgtagccccctacggctacactcggccccctcaggggctggcgggccaggaaagcgacttcaccgcacctgatgtgtggtaccctggcggcatggtgagcagagtgccctatcccagtcccacttgtgtcaaaagcgaaatgggcccctggatggatagctactccggaccttacggggacatgcgtttggagactgccagggaccatgttttgcccattgactattactttccaccccagaagacctgcctgatctgtggagatgaagcttctgggtgtcactatggagctctcacatgtggaagctgcaaggtcttcttcaaaagagccgctgaagggaaacagaagtacctgtgcgccagcagaaatgattgcactattgataaattccgaaggaaaaattgtccatcttgtcgtcttcggaaatgttatgaagcagggatgactctgggagcccggaagctgaagaaacttggtaatctgaaactacaggaggaaggagaggcttccagcaccaccagccccactgaggagacaacccagaagctgacagtgtcacacattgaaggctatgaatgtcagcccatctttctgaatgtcctggaagccattgagccaggtgtagtgtgtgctggacacgacaacaaccagcccgactcctttgcagccttgctctctagcctcaatgaactgggagagagacagcttgtacacgtggtcaagtgggccaaggccttgcctggcctccgcaacttacacgtggacgaccagatggctgtcattcagtactcctggatggggctcatggtgtttgccatgggctggcgatccttcaccaatgtcaactccaggatgctctacttcgcccctgatctggttttcaatgagtaccgcatgcacaagtcccggatgtacagccagtgtgtccgaatgaggcacctctctcaagagtttggatggctccaaatcaccccccaggaattcctgtgcatgaaagccatgctactcttcagcattattccagtggatgggctgaaaaatcaaaaattctttgatgaacttcgaatgaactacatcaaggaactcgatcgtatcattgcatgcaaaagaaaaaatcccacatcctgctcaagacgcttctaccagctcaccaagctcctggactccgtgcatcctattgcgagagagctgcatcagttcacttttgacctgctaatcaagtcacacatggtgagcgtggactttccggaaatgatggcagagatcatctctgtgcaagtgcccaagatcctttctgggaaagtcaagcccatctatttccacacccagtgaagcattggaaaccctatttccccaccccagctcatgccccctttcagatgtcttctgcctgttataactctgcactactcctctgcagtgccttggggaattt

SEQ ID NO: 181 - DNA, 2379 bp, human
aaaaacaggtggaatccgggctggagccggagctccggcggcgcgggtggcggcacgtccctccagacagtaccacaggcacctggagtaccggcatcggtcgctgtggcccccgagtgtccgtcagagcctaggggagcctgccctcccgcgcctcgtcggggcccggccaggcaccttggccgccggcgcacggacgcgggcacgagcactagatcacggctgctggacctcggcacgttgacaagatttctctggggtaccgcggaggattactttgaatttcggtggtcgcctgtggtctggcatatttagaacttaagtctattatttcgggcaccatgactttgaggcttttagaagactggtgcagggggatggacatgaaccctcggaaagcgctattgattgccggcatctcccagagctgcagtgtggcagaaatcgaggaggctctgcaggctggtttagctcccttgggggagtacagactgcttggaaggatgttcaggagggatgagaacaggaaagtagccttagtagggcttactgcggagactagtcacgccctggtccctaaggagataccgggaaaagggggtatctggagagtgatctttaagccccctgacccagataatacattttttaagcagattaaatgaatttttagcgggagagggcatgacagtgggtgagttgagcagagctcttggacatgaaaatggctccttagacccagagcagggcatgatcccggaaatgtgggcccctatgttggcacaggcattagaggctcttcagcctgccctgcaatgcttgaagtataaaaagctgagagtgttctcgggcagggagtctccagaaccaggagaagaagaatttggacgctggatgtttcatactactcagatgataaaggcgtggcaggtgccagatgtagagaagagaaggcgattgctagagagccttcgaggcccagcacttgatgttattcgtgtcctcaagataaacaatcctttaattactgtcgatgaatgtctgcaggctcttgaggaggtatttggggttgcagataatcctagggagttgcaggtcaaatatctaaccactcaccagaaggatgaggaaaagttgtcggcttatgtactaaggctggagcctttgttacagaagctggtacagagaggagcaattgagagagatgctgtgaatcaggcccgcctagaccaagtcattgctggggcagtccacaaaacaattcgcagagagcttaatctgccagaggatggcccagcccctggtttcttgcagttattggtactaataaaggattatgaggcagctgaggaggaggaggcccttctccaggcaatattggaaggtaatttcacctgagtctcagggaaccacgaagggatatggcaacgagtagagcatgaaggtagaacagtctatatactcttgtgacacatacaatccctaccttgtgctgccaagtaactcatttttgtgcaattctcagtataagccctttgtcgtttctatgcctatttaaagtctcctaaaggtgtaattgactaggaaggatgtagttctacactgccatttacctatttaaattcatccttgtgaatatctttgttgttgttgttgagacagagtctcgctctgtcacccaggctggagtgcagtggcgtgatcttggctcactgcatcctccgccttccaggtttaagctattctcctgcctcagttgcccgagtagctgggactacaggcatgtgccaccacgcccagctaagttttgcattatcagtagagacggggtttcaccatgttggccaggctagtttcgaactcctgacctcaagtgatccacctgcttcggcctctgaaagtgctgggattacaggcgtgagacactgcgcccagcctcatccctgtgaatttcttattgtacacaagttctttcactatctgtgtgcagtgctctgaggggacagacaaggcttgggtgtatatgccaaccagatctcattgaagtatcagcttgtttggtactaggtgcaagtgtagcatgtcacatgtgaccatgttggatcattgacaatttttaggtatgtactgacctacatttatgatgaagatcctgagcggaggttaagatattaagttattttccatatgaatcagaattatattgattctgtgcaatcaaaacaaaaggcagaatagaatgctgagattggttaagtttgcaatgaccatcttgaaccacagatttctgctatgtgtcatcaaaacatctagttctgagtaacattttcacgattgttataaaattataggtgtgaacttctaaaataaaggaatgct

SEQ ID NO: 182 - DNA, 1399 bp, human
agtgtgaaatcttcagagaagaatttctctttagttctttgcaagaaggtagagataaagacactttttcaaaaatggcaatggtatcagaattcctcaagcaggcctggtttattgaaaatgaagagcaggaatatgttcaaactgtgaagtcatccaaaggtggtcccggatcagcggtgagcccctatcctaccttcaatccatcctcggatgtcgctgccttgcataaggccataatggttaaaggtgtggatgaagcaaccatcattgacattctaactaagcgaaacaatgcacagcgtcaacagatcaaagcagcatatctccaggaaacaggaaagcccctggatgaaacacttaagaaagcccttacaggtcaccttgaggaggttgttttagctctgctaaaaactccagcgcaatttgatgctgatgaacttcgtgctgccatgaagggccttggaactgatgaagatactctaattgagattttggcatcaagaactaacaaagaaatcagagacattaacagggtctacagagaggaactgaagagagatctggccaaagacataacctcagacacatctggagattttcggaacgctttgctttctcttgctaagggtgaccgatctgaggactttggtgtgaatgaagacttggctgattcagatgccagggccttgtatgaagcaggagaaaggagaaaggggacagacgtaaacgtgttcaataccatccttaccaccagaagctatccacaacttcgcagagtgtttcagaaatacaccaagtacagtaagcatgacatgaacaaagttctggacctggagttgaaaggtgacattgagaaatgcctcacagctatcgtgaagtgcgccacaagcaaaccagctttctttgcagagaagcttcatcaagccatgaaaggtgttggaactcgccataaggcattgatcaggattatggtttcccgttctgaaattgacatgaatgatatcaaagcattctatcagaagatgtatggtatctccctttgccaagccatcctggatgaaaccaaaggagattatgagaaaatcctggtggctctttgtggaggaaactaaacattcccttgatggtctcaagctatgatcagaagactttaattatatattttcatcctataagcttaaataggaaagtttcttcaacaggattacagtgtagctacctacatgctgaaaaatatagcctttaaatcatttttatattataactctgtataatagagataagtccattttttaaaaatgttttccccaaaccataaaaccctatacaagttgttctagtaacaatacatgagaaagatgtctatgtagctgaaaataaaatgacgtcacaagac

SEQ ID NO: 183 - DNA, 3129 bp, human
cccgcactaaagacgcttcttcccggcgggtaggaatcccgccggcgagccgaacagttccccgagcgcagcccgcggaccaccacccggccgcacgggccgcttttgtcccccgcccgccgcttctgtccgagaggccgcccgcgaggcgcatcctgaccgcgagcgtcgggtcccagagccgggcgcggctggggcccgaggctagcatctctcgggagccgcaaggcgagagctgcaaagtttaattagacacttcagaattttgatcacctaatgttgatttcagatgtaaaagtcaagagaagactctaaaaatagcaaagatgcttttgagccagaatgccttcatcttcagatcacttaatttggttctcatggtgtatatcagcctcgtgtttggtatttcatatgattcgcctgattacacagatgaatcttgcactttcaagatatcattgcgaaatttccggtccatcttatcatgggaattaaaaaaccactccattgtaccaactcactatacattgctgtatacaatcatgagtaaaccagaagatttgaaggtggttaagaactgtgcaaataccacaagatcattttgtgacctcacagatgagtggagaagcacacacgaggcctatgtcaccgtcctagaaggattcagcgggaacacaacgttgttcagttgctcacacaatttctggctggccatagacatgtcttttgaaccaccagagtttgagattgttggttttaccaaccacattaatgtgatggtgaaatttccatctattgttgaggaagaattacagtttgatttatctctcgtcattgaagaacagtcagagggaattgttaagaagcataaacccgaaataaaaggaaacatgagtggaaatttcacctatatcattgacaagttaattccaaacacgaactactgtgtatctgtttatttagagcacagtgatgagcaagcagtaataaagtctcccttaaaatgcaccctccttccacctggccaggaatcagaatcagcagaatctgccaaaataggaggaataattactgtgtttttgatagcattggtcttgacaagcaccatagtgacactgaaatggattggttatatatgcttaagaaatagcctccccaaagtcttgaggcaaggtctcgctaagggctggaatgcagtggctattcacaggtgcagtcataatgcactacagtctgaaactcctgagctcaaacagtcgtcctgcctaagcttccccagtagctgggattacaagcgtgcatccctgtgccccagtgattaagttttattatgtagaaaataaagagcaaacagtacagctgatatggactctctctctctttttttttttttttaagaattttcataactttttagcctggccatttcctaacctgccaccgttggaagccatggatatggtggaggtcatttacatcaacagaaagaagaaagtgtgggattataattatgatgatgaaagtgatagcgatactgaggcagcgcccaggacaagtggcggtggctataccatgcatggactgactgtcaggcctctgggtcaggcctctgccacctctacagaatcccagttgatagacccggagtccgaggaggagcctgacctgcctgaggttgatgtggagctccccacgatgccaaaggacagccctcagcagttggaactcttgagtgggccctgtgagaggagaaagagtccactccaggacccttttcccgaagaggactacagctccacggaggggtctgggggcagaattaccttcaatgtggacttaaactctgtgtttttgagagttcttgatgacgaggacagtgacgacttagaagcccctctgatgctatcgtctcatctggaagagatggttgacccagaggatcctgataatgtgcaatcaaaccatttgctggccagcggggaagggacacagccaacctttcccagcccctcttcagagggcctgtggtccgaagatgctccatctgatcaaagtgacacttctgagtcagatgttgaccttggggatggttatataatgagatgactccaaaactattgaatgaacttggacagacaagcacctacagggttctttgtctctgcatcctaacttgctgccttatcgtctgcaagtgttctccaagggaaggaggaggaaactgtggtgttcctttcttccaggtgacatcacctatgcacattcccagtatggggaccatagtatcattcagtgcattgtttacatattcaaagtggtgcactttgaaggaagcacatgtgcacctttcctttacactaatgcacttaggatgtttctgcatcatgtctaccagggagcagggttccccacagtttcagaggtggtccaggaccctatgatatttctcttctttcgttcttttttttttttttttgagacagagtctcgttctgtcgcccaagctggagcgcaatggtgtgatcttggctcactgcaacatccgcctcccgggttcaggtgattctcctgcctcagcctccctcgcaagtagctgggattacaggcgcctgccaccatgcctagcaaatttttgtatttttagtggagacaggattttaccatgttggccaggctggtctcgaactcctgacctcaagtgatctgccctcctcagcctcgtaaagtgctgggattacaggggtgagccgctgtgcctggctggccctgtgatatttctgtgaaataaattgggccagggtgggagcagggaaagaaaaggaaaatagtagcaagagctgcaaagcaggcaggaagggaggaggagagccaggtgagcagtggagagaaggggggccctgcacaaggaaacagggaagagccatcgaagtttcagtcggtgagccttgggcacctcacccatgtcacatcctgtctcctgcaattggaattccaccttgtccagccctccccagttaaagtggggaagacagactttaggatcacgtgtgtgactaatacagaaaggaaacatggcgtcggggagagggataaaacctgaatgccatattttaagttaaaaaaaaaaaa

SEQ ID NO: 184 - DNA, 2528 bp, human
cccaaaggtaggctcaggctccgacggtggccggcgggggtcacgaggcttcgtagtggaggaacgggtttggcgtgtgggacgcagctgcctctgtactggggagtcacggagtggccgggctccagggacatggcggcggcctctgcggtgtcggtgctgctggtggcggcggagaggaaccggtggcatcgtctcccgagcctgctcctgccgccgaggacatgggtgtggaggcaaagaaccatgaagtacacaacagccacaggaagaaacattaccaaggtcctcattgcaaacagaggagaaattgcctgcagggtgatgcgcacagccaaaaaactgggtgtacagactgtggcggtttatagtgaggctgacagaaattccatgcatgtagatatggcagatgaagcatattccatcggccccgctccctcccagcagagctacctatctatggagaaaatcattcaagtggccaagacctctgctgcacaggctatccatccaggatgcggttttctttcagaaaacatggaatttgctgaactttgtaagcaagaaggaattatttttataggccctcctccatctgcaattagagacatgggtataaagagcacatccaaatccataatggctgctgctggagtacctgttgtggagggttatcatggtgaggaccaatcagaccagtgcctgaaggaacacgccaggagaattggctatcctgtcatgattaaagccgtccggggtggaggaggaaaaggaatgaggattgttagatcagaacaagaatttcaagaacagttagagtcagcacggagagaagctaagaagtctttcaatgatgatgctatgctgatcgagaagtttgtagacacaccgaggcatgtagaagtccaggtgtttggtgatcaccatggcaatgctgtgtacttgtttgaaagagactgtagtgtgcagaggcgacatcagaagatcattgaggaggccccagcgcctggtattaaatctgaagtaagaaaaaagctgggagaagctgcagtcagagctgctaaagctgtaaattatgttggagcagggactgtggagtttattatggactcaaaacataatttctgtttcatggagatgaatacaaggctgcaagtggaacatcctgttactgagatgatcacaggaactgacttggtggagtggcagcttagaattgcagcaggagagaagattcctttgagccaggaagaaataactctgcagggccatgccttcgaagctagaatatatgcagaagatcctagcaataacttcatgcctgtggcaggcccattagtgcacctctctactcctcgagcagacccttccaccaggattgaaactggagtacggcaaggagacgaagtttccgtgcattatgaccccatgattgcgaagctggtcgtgtgggcagcagatcgccaggcggcattgacaaaactgaggtacagccttcgtcagtacaatattgttggactgcccaccaacattgacttcttactcaacctgtctggccacccagagtttgaagctgggaacgtgcacactgatttcatccctcaacaccacaaacagttgttgctcagtcggaaggctgcagccaaagagtctttatgccaggcagccctgggtctcatcctcaaggagaaagccatgaccgacactttcactcttcaggcacatgatcaattctctccattttcgtctagcagtggaagaagactgaatatctcgtataccagaaacatgactcttaaagatggtaaaaacaatgtagccatagctgtaacgtataaccatgatgggtcttatagcatgcagattgaagataaaactttccaagtccttggtaatctttacagcgagggagactgcacttacctgaaatgttctgttaatggagttgctagtaaagcgaagctgattatcctggaaaacactatttacctattttccaaggaaggaagtattgagattgacattccagtccccaaatacttatcttctgtgagctcacaagaaactcagggcggccccttagctcctatgactggaaccattgaaaaggtgtttgtcaaagctggagacaaagtgaaagcgggagattccctcatggttatgatcgccatgaagatggagcataccataaagtctccaaaggatggcacagtaaagaaagtgttctacagagaaggtgctcaggccaacagacacactcctttagtcgagtttgaggaggaagaatcagacaaaagggaatcggaataaactccagcaaggaaatggccagttaagtagtgtcttctctctccaccaaaaagaggaagtgcctccagcttttctgggggtctcataaagagcagttttactaaatgattgtatgcttatgctgaacacctttcatattggagaatcatgcatttgggtcactaattatctcaaaatatttcatactaataaagttgaattattttttattggaagcc

SEQ ID NO: 185 - DNA, 993 bp, human
aggccggaaccatggcagtgaccaaggagctcttacagatggacctgtacgcgctgctaggcattgaggagaaggcagcggacaaagaggtaaagaaggcgtataggcagaaggccctctcctgccacccagacaaaaatccagataatcccagagcagctgaactcttccaccagctttctcaggccttggaggtgctgaccgatgctgcagccagggctgcatatgacaaggtcaggaaagccaagaagcaagcagcagagaggacccagaaacttgatgagaaaaggaagaaagtgaagcttgacctggaggcccgggagcggcaggcccaggcccaggagagtgaggaggaagaggagagccggagcaccaggacactagagcaagagatcgaacgcctgagagaagagggttcccggcagctggaggaacagcagaggctcatccgggagcagatacgccaggagcgtgaccagaggttgagaggaaaggcagaaaatactgaaggccaaggaacccccaaactaaagctaaaatggaagtgcaagaaggaggatgagtcaaaaggtggctactccaaagacgtcctcctacggcttttgcagaagtatggtgaggttctcaacctggtgctttccagtaagaagccaggcactgctgtggtggagtttgcaaccgtcaaggcagcggagctggctgtccagaatgaagttggcctggtggataaccctctgaagatttcctggttggagggacagccccaggatgccgtgggccgcagccactcaggactgtcaaagggctcagtgctgtcagagagggactacgagagcctcgtcatgatgcgcatgcgccaggcggccgagcggcaacagctgatcgcacggatgcagcaggaagaccaggaggggccgcctacgtagccccagctccagccatccacccctcagcccttttcttcaacgtcaccaataaatttttttttttttt

SEQ ID NO: 186 - DNA, 2088 bp, human
gcgagggagggggaggagagagagggaggcggagggcagtgagagacgcatttccagttctcaactacgagccacgagtttgcagatggggctgctcggcggcgcctgtggctgagggagagcagcggcggcggggagcgaccgggagcggcggcagcggcggcgcggaggcggctgaggtgcgagccgcaatgcagcaagtcttggaaaaccttacggagctgccctcgtctactggagcagaagaaatagacctaattttcctcaagggaattatggagaatcctattgtaaaatcacttgctaaggctcgtgagaggctagaagattccaaactagaagctgtcagtgacaataacttggaattagtcaatgaaattcttgaagacatcactcctctaataaatgtggatgaaaatgtggcagaattggttggtatactcaaagaacctcacttccagtcactgttggaggcccatgatattgtggcatcaaagtgttatgattcacctccatcaagcccagaaatgaataattcttctatcaataatcagttattaccagtagatgccattcgtattcttggtattcacaaaagagctggggaaccactgggtgtgacatttagggttgaaaataatgatctggtaattgcccgaatcctccatgggggaatgatagatcgacaaggtctacttcatgtgggagatataattaaagaagtcaatggccatgaggttggaaataatccaaaggaattacaagaattactgaaaaatattagtggaagtgtcaccctaaaaatcttaccaagttatagagataccattactcctcaacaggtatttgtgaagtgtcattttgattataatccatacaatgacaacctaataccttgcaaagaagcaggattgaagttttccaaaggagagattcttcagattgtaaatagagaagatccaaattggtggcaggctagccatgtaaaagagggaggaagcgctggtctcattccaagccagttcctggaagagaagagaaaggcatttgttagaagagactgggacaattcaggacctttttgtggaactataagtagcaaaaaaaagaaaaagatgatgtatctcacaaccagaaatgcagaatttgatcgtcatgaaatccagatatatgaggaggtagccaaaatgcctcccttccagagaaaaacattagtattgataggagctcaaggtgtaggccgaagaagcttgaaaaacaggttcatagtattgaatcccactagatttggaactacggtgccatttacttcacggaaaccaagggaagatgaaaaagatggccaggcatataagtttgtgtcacgatctgagatggaagcagatattaaagctggaaagtatttggaacatggggaatatgaaggaaatctctatggaaccaaaattgattctattcttgaggttgtccaaactggacggacttgcattctggatgtcaacccacaagcactgaaagtattgaggacatcagagtttatgccctatgtggtatttattgcggctccggagctagagacgttacgtgccatgcacaaggctgtggtggatgcaggaatcactaccaagcttctgaccgactctgacttgaagaaaacagtggatgaaagtgcacggattcagagagcatacaaccactattttgatttgatcatcataaatgataatctagacaaagcctttgaaaaactgcaaactgccatagagaaactgagaatggaaccacagtgggtcccaatcagctgggtttactgatgattcagtaaggttaacaatgaaaattaaactcttaaaaagtgactgcaacaaataaaccttctactgagaaaatacatcacagatagaagattatctgctaagtccaggcatttttatggtgtagattgaaataatagtacacttctgaatttttatataaaatgtggttggaaggtgtactaatatataatttatcttaatttttctaactttgtatggataatctttatcttcatatcacataaagaaatgcgttgaagcaaaaaaaaaa

SEQ ID NO: 187 - DNA, 8747 bp, human
caattctgaatcctgccttttgcacttaatgtttcataagtatttccccatgtcactaaaaattcttccaaataacattcacgatgtccatatggaatttcagatgtggatgaaccaaaatcttgtcaactattccactaacagtggttatttagggatgttcagacatttcactatttaaaaaaaaatgtttccacaaatacctttgtggcataagtttttatgagtggagttactgttctgaagttcctgctgaatagaaaatgctttccagtgaggctgtcccaagccacattcccatcagtgacaagcgagagacagctggtcttttcaaatccggagaccaaatattatctttgaaaaaaaatggatttttgcctaatttggtagtcaccaaatagcatctcattgttcttttaattatctgcttccttttagtagagatccctaaaaagatctgaaaggagtcttcagataaaggaaggagctttcttttgtctgtctacaatcaacaaatatttattatgcaaaccattttgctccgagttttctcctctttccctttttggacagatttgggagatctcacctttcaggttttagacatcgtgcagggaggagttttgaggtagggtgcagcttacggtccaggataaaacatactgattctgccactaccaggctttgtgaaaagcaagtcatgaaaacgctctgaaattctagaccttcagtagataggatctaccgtgtctataaaaatatgaagatccttaagttttattaaagattcgaaaaaagtaaaagtgtttttacggttttattttcatttttatttcttaccgttatcgtttattataaaggatattataaaggatacagatgaagagatacgtaatgcaaggcctgtgagaaggggcgtggagcttccgaaacctcttccagccaccaccctccaagaacctggagtttctttttttttttttaattctacaaatgtaatattagaattgattttatctggccattagtgtgtgtcctaactcgttcgtttctgagagtcccatctcccggcccgggatatcatctttcctgtgtcagtgaaagtgcagagtagatgagaacctttaaccaccaacattagggaggggtcccagacaaagggggtaagtcatgctctgtagagaaaaggttccctgcctccgaactacctctggaacactccagtaaatgtttcctcttttgatatagaaaagagggatcgtgtgtagagtgcagtctgggcaatccctctcctcgggaccatttcggggtaggggcctctggggtccgtgtcgcgacgcacgcgcctcggtcccagctatctccgcagcgggccaccccgcctgcggacgcagtttctcggccccgccccacactcgctcccccgccccacccagtctccgcgccggagggaagtggcgcgagggggaaagcactgtctgcgcgcccactgcaaacctcagccagtctgagatcgctttaaacgtctgacccccacccccactccgccccgcccagttcttcaacctaatttctgattcgtgccaaagcttgtcctctgctcaaaatcgtggaagacgccgagtatggggaccgaagacctgggttcaagcccggcttggaatccctgcccatccctggcatttcatctctccgggcttatttgctggtttctccgaatgcgggccttgtctggttcacgctggatccccaacgcctagaacagtgcgtggcacgcagttcgtccttctataaatatcggactaaatgcatctctgtgatggtaatacccacacggtgttgtgagaatgaatgagtgattctgtgcaagttcctagtgatctgttacaaaaagtactggtcgctaaattactcttataataaagcatacttttaggataataaagcactattcgcgaattggttaccgctattatgaaattactgagcaatacatatctacatctgatcagtctccagaattatgccaaatcctaccttcttctgaaagtatctcctaattatctgcacctgaccctagtgatgctgtgaatgtgcaagtatagctacatcctccgaaggaaaggatctttactccttttacctcctgaatgggctgcgtctgctgaaagcgcgggggaatgggcggttggaagcttggccctacttccagcattgccgcctactggttgggttactccagcaagtcactccccttccctgggcctcagtgtctctactgtagcattcccaggtctggaattccatccactttagcaaggatggacgcgccacagagagacgcgttcctagcccgcgcttcccacctgtcttcaggcgcatcccgcttccctcaaacttaggaaatgcctctgggaggtcctgtccggctccggactcactaccgaccacccgcaaacagcagggtcccctgggcttcccaagccgcgcacctctccgccccgcccctgcgccctccttcctcgcgtctgcccctctcccccaccccgccttctccctccccgccccagcggcgcatgcgccgcgctcggagcgtgtttttataaaagtccggccgcggccagaaacttcagtttgttggctgcggcagcaggtagcaaagtgacgccgagggcctgagtgctccagtagccaccgcatctggagaaccagcggttaccatggaggggatcagtgtaagtccagtttcaacctgctttgtcataaatgtacaaacgtttgaacttagagcgcagcccctctccgagcgggcagaagcggccaggacattggaggtacccgtactccaaaaaagggtcaccgaaaggagttttcttgaccatgcctatatagtgcgggtgggtggggggggagcaggattggaatctttttctctgtgagtcgaggagaaacgactggaaagagcgttccagtggctgcatgtgtctcccccttgagtcccgccgcgcgcggcggcttgcacgctgtttgcaaacgtaagaacattctgtgcacaagtgcagagaaggcgtgcgcgctgcctcgggactcagaccaccggtctcttccttggggaagcggggatgtcttggagcgagttacattgtctgaatttagaggcggagggcggcgtgcctgggctgagttcccaggaggagattgcgcccgctttaacttcggggttaagcgcctggtgactgttcttgacactgggtgcgtgtttgttaaactctgtgcggccgacggagctgtgccagtctcccagcacagtaggcagagggcgggagaggcgggtggacccaccgcgccgatcctctgaggggatcgagtggtggcagcagctaggagttgatccgcccgcgcgctttgggtttgagggggaaaccttcccgccgtccgaagcgcgcctcttccccacggccgcgagtgggtcctgcagttcgagagtttggggtcgtgcagaggtcagcggagtggtttgacctcccctttgacaccgcgcagctgccagccctgagatttgcgctccggggataggagcgggtacggggtgaggggcgggggcggttaagaccgcacctgggctgccaggtcgccgccgcgaagactggcaggtgcaagtggggaaaccgtttggctctctccgagtccagttgtgatgtttaaccgtcggtggtttccagaaaccttttgaaaccctcttgctagggagtttttggtttcctgcagcggcgcgcaattcaaagacgctcgcggcggagccgcccagtcgctccccagcaccctgtgggacagagcctggcgtgtcgcccagcggagcccctgcagcgctgcttgcgggcggttggcgtgggtgtagtgggcagccgcggcggcccggggctggacgacccggccccccgcgtgcccaccgcctggaggcttccagctgcccacctccggccgggttaactggatcagtggcggggtaatgggaaaccacccgggagagtgaggaaatgaaacttggggcgaggaccacgggtgcagaccccgttaccttctccacccaggaaaatgccccgctccctaacgtcccaaacgcgccaagtgataaacacgaggatggcaagagacccacacaccggaggagcgcccgcttgggggaggaggtgccgtttgttcattttctgacactcccgcccaatataccccaagcaccgaagggccttcgttttaagaccgcattctctttacccactacaagttgcttgaagcccagaatggtttgtatttaggcaggcgtgggaaaattaagtttttgcgccttaggagaatgagtctttgcaacgcccccgccctccccccgtgatcctcccttctcccctcttccctccctgggcgaaaaacttcttacaaaaagttaatcactgcccctcctagcagcacccaccccaccccccacgccgcctgggagtggcctctttgtgtgtattttttttttcctcctaaggaaggttttttttcttccctctagtgggcggggcagaggagttagccaagatgtgactttgaaaccctcagcgtctcagtgcccttttgttctaaacaaagaattttgtaattggttctaccaaagaaggatataatgaagtcactatgggaaaagatggggaggagagttgtaggattctacattaattctcttgtgcccttagcccactacttcagaatttcctgaagaaagcaagcctgaattggttttttaaattgctttaaaaaatttttttaactgggttaatgcttgctgaattggaagtgaatgtccattcctttgcctcttttgcagatatacacttcagataactacaccgaggaaatgggctcaggggactatgactccatgaaggaaccctgtttccgtgaagaaaatgctaatttcaataaaatcttcctgcccaccatctactccatcatcttcttaactggcattgtgggcaatggattggtcatcctggtcatgggttaccagaagaaactgagaagcatgacggacaagtacaggctgcacctgtcagtggccgacctcctctttgtcatcacgcttcccttctgggcagttgatgccgtggcaaactggtactttgggaacttcctatgcaaggcagtccatgtcatttacacagtcaacctctacagcagtgtcctcatcctggccttcatcagtctggaccgctacctggccatcgtccacgccaccaacagtcagaggccaaggaagctgttggctgaaaaggtggtctatgttggcgtctggatccctgccctcctgctgactattcccgacttcatctttgccaacgtcagtgaggcagatgacagatatatctgtgaccgcttctaccccaatgacttgtgggtggttgtgttccagtttcagcacatcatggttggccttatcctgcctggtattgtcatcctgtcctgctattgcattatcatctccaagctgtcacactccaagggccaccagaagcgcaaggccctcaagaccacagtcatcctcatcctggctttcttcgcctgttggctgccttactacattgggatcagcatcgactccttcatcctcctggaaatcatcaagcaagggtgtgagtttgagaacactgtgcacaagtggatttccatcaccgaggccctagctttcttccactgttgtctgaaccccatcctctatgctttccttggagccaaatttaaaacctctgcccagcacgcactcacctctgtgagcagagggtccagcctcaagatcctctccaaaggaaagcgaggtggacattcatctgtttccactgagtctgagtcttcaagttttcactccagctaacacagatgtaaaagacttttttttatacgataaataacttttttttaagttacacatttttcagatataaaagactgaccaatattgtacagtttttattgcttgttggatttttgtcttgtgtttctttagtttttgtgaagtttaattgacttatttatataaattttttttgtttcatattgatgtgtgtctaggcaggacctgtggccaagttcttagttgctgtatgtctcgtggtaggactgtagaaaagggaactgaacattccagagcgtgtagtgaatcacgtaaagctagaaatgatccccagctgtttatgcatagataatctctccattcccgtggaacgtttttcctgttcttaagacgtgattttgctgtagaagatggcacttataaccaaagcccaaagtggtatagaaatgctggtttttcagttttcaggagtgggttgatttcagcacctacagtgtacagtcttgtattaagttgttaataaaagtacatgttaaacttacttagtgttatgttctgatttctgttgacattcttttggctagtagaagacaaaagtaatacatttatggtatgcaaagcactatcctaggtatttcattgtaatattttacttaccccttatcacaactctgatagattctgcttctgttactaattacattttatagaagaggaaacggaggcacagaaagcctaagtaacttggttaaaggcatgtagtaagtatcaaatcctgtattttaaaccaggtaacatgacttaacgaatctgaagccttcaccactttaaattcaaatggaagtttagaaatggccagccagcacctatttgtatgaaaggtcatctttcagaggataagcatgtataaagaagaaaaggtatgcagtcgtgtttggattttactccaccatccacttgtgaaacccaggtctgtgcaatgccagacggtgtgtgctttcctcatccagtatcctcagtgtagataaccatcactcccttttcacagacaagagaactgagattcagagactttccatacattgcactttcaagggggcaaagccaagaactaattctgtttattgttccagctcttgctcttaactcttacctactattgcccttcagaacacctgggcataagtcaactgaactgctaataaagaaagccaaaagtgaatgttttcttcataaaattaaccatgaccaaaatactcctcttgtaatatcttctatgcaaatctcaacacttttattcttaaactatcgcaacacctagcacctcctcaaggactcagccaagcagctacaagttaatactgatatttgttagagtcagaaggaaggtccactgaagcaagctccctgttgctcacattttgcacaagattttggagacttatgtaaccacccgttgctattaacacgaccattgtgcaagccccaggctcttgagtaaatttcagctttggtttctatttaaagataatttctaaactctagccatacctacctcacattggaacacaaacagggtacactccaggcatgcactcagataataagtaggatataattacgacaatatttggtctacttttagtaattgtttctggcacagaaaatccattttggaggaaaaattgcaatgccttatctttctgaggcaaatcacatttgttcaaggcaaattatagatcctgtgaagggaaataacttaattacttaaaatagaatccaatttggctgtacatttttgctgccgtctatggatctggggtaattcaaagtggtattcatattctacttgaggacacaattagatttcagataggaaattatcttgaggtttcttggttttccctgagaagcctaattggatcacccttcatttaagcatagttttacatgcactctctcaaaggcttagtcttaaagccacaaccattgagacagacttcacttgaaccctctctataaatatttattctccgggagacaatagaagaaatccttggaaggcatgctttttctttctcatcttggcttgaaacctccttaccccagattcctctcctttaccgtggagtcacaacaaaaggaactgagccaaaacaaaattcccagtgtcaccagtcttaatggatatttcattctcccttggaacaaagatggaatagctttttttccaaaagaaaaacaagccttggctctctccctgccccaaaagggtgccccccacccccatcattctctgtcccaaccctgccatgttagagcgtctccaaagccttccctgtgtcgtggtttgtctgacaatgtggggaaacccagtctgctggccagcccttgcatgaagtagctgattgttccctctcctcatcccttatgaatggggcccttgaagttcagtcatgtagattcagttgtataatgaaagctaaaatatttaaattgtatgcatgctgccaataacagcatacatctgacatctaacttattaataacattaagcctgcaactaggggggaaagtggatgttttttcttgcaaagcctttgttttcctaaaatgacacttgaaaatttatctccccctactgcaggcttcccagcccccttttataattatgcttaaattaaaataatgattctgggatactcttttggggagataccctacaggctttattttaataattgaactaagtgtttgtgactttctcctagatattgtcaaatattaaataaaggctccataaacaattgagctgtcttattcccagataatacccatttaggaggggcaaggatcc

SEQ ID NO: 188 - DNA, 2546 bp, human
gctgccgctgccgcacctccgtagctgactcggtactctctgaagatggcagaagctcaccaagctgtggcctttcagttcacggtcactccggacgggattgacctgcggctgagccatgaagctcttagacaaatctatctctctggacttcattcctggaaaaagaagttcatcagattcaagaacggcatcatcactggcgtgtacccggcaagcccctccagttggcttatcgtggtggtgggcgtgatgacaacgatgtacgccaagatcgacccctcgttaggaataattgcaaaaatcaatcggactctggaaacggccaactgcatgtccagccagacgaagaacgtggtcagcggcgtgctgtttggcaccggcctgtgggtggccctcatcgtcaccatgcgctactccctgaaagtgctgctctcctaccacgggtggatgttcactgagcacggcaagatgagtcgtgccaccaagatctggatgggtatggtcaagatcttttcaggccgaaaacccatgttgtacagcttccagacatcgctgcctcgcctgccggtcccggctgtcaaagacactgtgaacaggtatctacagtcggtgaggcctcttatgaaggaagaagacttcaaacggatgacagcacttgctcaagattttgctgtcggtcttggaccaagattacagtggtatttgaagttaaaatcctggtgggctacaaattacgtgagcgactggtgggaggagtacatctacctccgaggacgagggccgctcatggtgaacagcaactattatgccatggatctgctgtatatccttccaactcacattcaggcagcaagagccggcaacgccatccatgccatcctgctttacaggcgcaaactggaccgggaggaaatcaaaccaattcgtcttttgggatccacgattccactctgctccgctcagtgggagcggatgtttaatacttcccggatcccaggagaggagacagacaccatccagcacatgagagacagcaagcacatcgtcgtgtaccatcgaggacgctacttcaaggtctggctctaccatgatgggcggctgctgaagccccgggagatggagcagcagatgcagaggatcctggacaatacctcggagcctcagcccggggaggccaggctggcagccctcaccgcaggagacagagttccctgggccaggtgtcgtcaggcctattttggacgtgggaaaaataagcagtctcttgatgctgtggagaaagcagcgttcttcgtgacgttagatgaaactgaagaaggatacagaagtgaagacccggatacgtcaatggacagctacgccaaatctctactacacggccgatgttacgacaggtggtttgacaagtcgttcacgtttgttgtcttcaaaaacgggaagatgggcctcaacgctgaacactcctgggcagatgcgccgatcgtggcccacctttgggagtacgtcatgtccattgacagcctccagctgggctatgcggaggatgggcactgcaaaggcgacatcaatccgaacattccgtaccccaccaggctgcagtgggacatcccgggggaatgtcaagaggttatagagacctccctgaacaccgcaaatcttctggcaaacgacgtggatttccattccttcccattcgtagcctttggtaaaggaatcatcaagaaatgtcgcacgagcccagacgcctttgtgcagctggccctccagctggcgcactacaaggacatgggcaagttttgcctcacatacgaggcctccatgacccggctcttccgagaggggaggacggagaccgtgcgctcctgcaccactgagtcatgcgacttcgtgcgggccatggtggacccggcccagacggtggaacagaggctgaagttgttcaagttggcgtctgagaagcatcagcatatgtatcgcctcgccatgaccggctctgggatcgatcgtcacctcttctgcctttacgtggtgtctaaatatctcgctgtggagtcccctttccttaaggaagttttatctgagccttggagattatcaacaagccagacccctcagcagcaagtggagctgtttgacttggagaataacccagagtacgtgtccagcggagggggctttggaccggttgctgatgacggctatggtgtgtcgtacatccttgtgggagagaacctcatcaatttccacatttcttccaagttctcttgccctgagacggggattataagtcaaggaccaagttcagatacttgagacaaagtggaaagtctcagcatatggaaacaaggccttggaggagaccatggacatcaccaagttcatgtgctgggctggaaagaaaagcctgttgattttcacttgctgtgcatttattcatccattccattgcctcaatgctgagaacagtgcctgacacataaaagatgctcaataaatatgttaaaagtaaaaaaaaaaaaaaaaaaaaaaaaaaaaaaaaaaaa

SEQ ID NO: 189 - DNA, 1568 bp, human
gaattccggccaagatggcagcaatgaggaaggcgcttccgcggcgactggtgggcttggcgtccctccgggctgtcagcacctcatctatgggcactttaccaaagcgggtgaaaattgtggaagttggtccccgagatggactacaaaatgaaaagaatatcgtatctactccagtgaaaatcaagctgatagacatgctttctgaagcaggactctctgttatagaaaccaccagctttgtgtctcctaagtgggttccccagatgggtgaccacactgaagtcttgaagggcattcagaagtttcctggcatcaactacccagtcctgaccccaaatttgaaaggcttcgaggcagcggttgctgctggagccaaggaagtagtcatctttggagctgcctcagagctcttcaccaagaagaacatcaattgttccatagaggagagttttcagaggtttgacgcaatcctgaaggcagcgcagtcagccaatatttctgtgcgggggtacgtctcctgtgctcttggctgcccttatgaagggaagatctccccagctaaagtagctgaggtcaccaagaagttctactcaatgggctgctacgagatctccctgggggacaccattggtgtgggcaccccagggatcatgaaagacatgctatctgctgtcatgcaggaagtgcctctggctgccctggctgtccactgccatgacacctatggtcaagccctgaccaacaccttgatggccctgcagatgggagtgagtgtcgtggactcttctgtggcaggacttggaggctgtccctacgcacagggggcatcaggaaacttggccacagaagacctggtctacatgctagagggcttgggcattcacacgggtgtgaatctccagaagcttctggaagctggaaactttatctgtcaagccctgaacagaaaaactagctccaaagtggctcaggctacctgtaaactctgagccccttgcccacctgaagccctggggatgatgtggaaataggggcacacacagatgattcatggatggggacatggaaatgagaataggttaaatggtgcaggtacctcatagccagctctacacagaggtctctcctggcagaaagcaggcgaagggcaggaggagctgcttggcagaaggacctcctgcccagacctgaggagtgagaggctttgagggctgaagtctccctttgttacggaccctggcccaggagttgaatgcctgaggacgtgtgggaaccccgttccctacttagcatgatccttgagtctcctctctggatggaatccgcgagctggccacctggccaccctctacacggctccaccctgccatggccgtggggcccttgctctctgacttctcaggacacaggtcatggaggttcttcccaagctggcagaggccatttgtggaaagtggagagctacgtggtggccgtctgccaactccagcatctctggaaaatctccacgctgaatgtgatttttgaaaacagcttatgtaattaaaggttgaatggcacatcat

SEQ ID NO: 190 - DNA, 961 bp, human
gaaaattgtatggagaacttaaaacatcacgaatatttttaataggatccgcagacacccaaaggagaagcttggtcttttccaggtatttccaacttgagttcaacccaaagcctttgaaaggaatgcattaccacatgaccacatgctgagaccccatggggtctaacacgggacctaagaaagtctctgcagccagatagtacatggtgtctccacaaaactaggcattctggagattgcccagaaagggatgtgaggggaccgttaagatctgtcttgcttatctcatgcactcacattccttcagcctcctggagttcctgataaaaggaagccaggtgtggacattttttagctattgatttcccaatagcttgtggatcagttgtacacccacacttccttctctgcctaattccgtttttctggaaaaagtagtatgcccatgtatgtgtgtttttcttaacacaggtccatgaaagttggcttcctggttgatgtctgttgcgtggcctggaaaccagggagcagcaactattgagatggtttctgtgttcagtgaaaaattctatttcattgagacatttttctttatccacagtaattttttgacactgtcatcatgaaactaccccttaggaaaataagattacctggcaaaaataagagaaacggaaactgacgttatgggacattaggaaaccggtttgtgaaggattctggaattaaacttagagctgcattacctttacgatgggcaacacccttgagtttgatttccaaggttagttaaaggcctagttatatttatcaagtctaggcactatttattactccccagcggtgttgtatcaaaggggggggaggaaggataaactggggaaaggctgtgaaaccctgttctacaaaaggaggatcttgtgaaagagatttcggcaatattgattggtgggagaga

SEQ ID NO: 191 - DNA, 2129 bp, human
actgtttcacacttttctgcttctggaaggtgctggacaaaaacatggaactaatttccccaacagtgattataatcctgggttgccttgctctgttcttactccttcagcggaagaatttgcgtagacccccgtgcatcaagggctggattccttggattggagttggatttgagtttgggaaagcccctctagaatttatagagaaagcaagaatcaagtatggaccaatatttacagtctttgctatgggaaaccgaatgacctttgttactgaagaagaaggaattaatgtgtttctaaaatccaaaaaagtagattttgaactagcagtgcaaaatatcgtttatcgtacagcatcaattccaaagaatgtctttttagcactgcatgaaaaactctatattatgttgaaagggaaaatggggactgtcaatctccatcagtttactgggcaactgactgaagaattacatgaacaactggagaatttaggcactcatgggacaatggacctgaacaacttagtaagacatctcctttatccagtcacagtgaatatgctctttaataaaagtttgttttccacaaacaagaaaaaaatcaaggagttccatcagtattttcaagtttatgatgaagattttgagtatgggtcccagttgccagagtgtcttctaagaaactggtcaaaatccaaaaagtggttcctggaactgtttgagaaaaacattccagatataaaagcatgtaaatctgcaaaagataattccatgacattattgcaagctacgctggatattgtagagacggaaacaagtaaggaaaactcacccaattatgggctcttactgctttgggcttctctgtctaatgctgttcctgttgcattttggacacttgcatacgtcctttctcatcctgatatccacaaggccattatggaaggcatatcttctgtgtttggcaaagcaggcaaagataagattaaagtgtctgaggatgacctggagaaactccttctaattaaatggtgtgttttggaaaccattcgtttaaaagctcctggtgtcattactagaaaagtggtgaagcctgtggaaattttgaattacatcattccttctggtgacttgttgatgttgtctccattttggctgcatagaaatccaaagtattttcctgagcctgaattgttcaaacctgaacgttggaaaaaggcaaatttagagaagcactctttcttggactgcttcatggcatttggaagcgggaagttccagtgtcctgcaaggtggtttgctctgttagaggttcagatgtgtattattttaatactttataaatatgactgtagtcttctggacccattacccaaacagagttatctccatttggtgggtgtcccccagccggaagggcaatgccgaattgaatataaacaaagaatatgacatctgttgggcctcacaaggaccagggccttctggaggagtggcactaccccacctggcagcacctagacctgagctctacaaaaacacactgcttcactttgttttaggacttagttcaagaacacattcaaatggtgcatgtgtttggtatcttcaacagtagaccaagaatctaacatcactctcagtaatatagagaccggaatacatggtttataggaaatgatcaaatgatccaaaaaaactccacattttttaagaagttggaatttgatttcatgcataactgtattaaaacattaaatagaaataatgtcatttgaatgaaaatcttatcacattaaattcactgtgaaggcagcatacttaaaggaatttgatttcatgcataactgtattaaaacattaaatagaaataatgtcatttgaatgaaaatcttatcacattaaattcactgtgaaggcagcatacttaaatttttattttgaaaagtctaaaaggcttagatttttaaaatttaataattatttctacaaattttctatttttcttgaggtgattctcaactagcaattggaactcctaggctctattaacataattctttattgtaaacgtatctaatgctaaaagtaataaaatggtagttttctgagacctgtgaggacagg

SEQ ID NO: 192 - DNA, 873 bp, human
  misc_feature (622)..(622): n is a, c, g, or t
tttttttttttcagtgtggaaaaaaatctttatttcaaagtaaaatgcacaaagtctcatacagcagataaaatcagtgttactgctctcagatgttaaggttagcaacctttctggcatatgctaattcatcatgaactcccaatagctgaactgaatggcttttaagtacagctataaggtctcatggtataattccttttgttgatgccagtgacaggattttaaaagctacattccattaaaaattaaaaatacagcagcttttccaggggaactagatcccaaaattgtacccagaactcttgtctaagatattaagttaaatatcttgcatgtatatatcattatagtaaatcagtattcttgacaaccacagtgtaagaaattaaactttggctaattgttttccccatcatgaaatcagtcttttgctgtcttcataaataaattatgaccaaacattacaaatactttatacatgtttactgatttacagagaatatttaataatcagaactcaccagtttcaatagtattgtacattaaattataagcaatataaccactgctacaaaagttatctaagttaatccaagataaaaactgtgtctagagtttnaatacattgaaataggaaagaaaatagaaattagaaaatagtcttcgagttctgaaaatctagaaggattctccaacatctgctctcttatctcgacatttgcttcagctttgggttcgagctttgagggctgcgaggttataaaatggctttcgaaacggaaaatctccctcggttttaggcgtgccggcctccagctcacccgggggtcccagttccaataccttccgagggattcccttggccgccag

SEQ ID NO: 193 - DNA, 2062 bp, human
gtcagtccctcctgtagccgccgccgccgccgcccgccgcccctctgccagcagctccggcgccacctcgggccggcgtctccggcgggcgggagccaggcgctgacgggcgcggcgggggcggccgagcgctcctgcggctgcgactcaggctccggcgtctgcgcttccccatggggctggcctgcggcgcctgggcgctctgagattgtcactgctgttccaagggcacacgcagagggatttggaattcctggagagttgcctttgtgagaagctggaaatatttctttcaattccatctcttagttttccataggaacatcaagaaatcatgaacaactttggtaatgaagagtttgactgccacttcctcgatgaaggttttactgccaaggacattctggaccagaaaattaatgaagtttcttcttctgatgataaggatgccttctatgtggcagacctgggagacattctaaagaaacatctgaggtggttaaaagctctccctcgtgtcacccccttttatgcagtcaaatgtaatgatagcaaagccatcgtgaagacccttgctgctaccgggacaggatttgactgtgctagcaagactgaaatacagttggtgcagagtctgggggtgcctccagagaggattatctatgcaaatccttgtaaacaagtatctcaaattaagtatgctgctaataatggagtccagatgatgacttttgatagtgaagttgagttgatgaaagttgccagagcacatcccaaagcaaagttggttttgcggattgccactgatgattccaaagcagtctgtcgtctcagtgtgaaattcggtgccacgctcagaaccagcaggctccttttggaacgggcgaaagagctaaatatcgatgttgttggtgtcagcttccatgtaggaagcggctgtaccgatcctgagaccttcgtgcaggcaatctctgatgcccgctgtgtttttgacatgggggctgaggttggtttcagcatgtatctgcttgatattggcggtggctttcctggatctgaggatgtgaaacttaaatttgaagagatcaccggcgtaatcaacccagcgttggacaaatactttccgtcagactctggagtgagaatcatagctgagcccggcagatactatgttgcatcagctttcacgcttgcagttaatatcattgccaagaaaattgtattaaaggaacagacgggctctgatgacgaagatgagtcgagtgagcagacctttatgtattatgtgaatgatggcgtctatggatcatttaattgcatactctatgaccacgcacatgtaaagccccttctgcaaaagagacctaaaccagatgagaagtattattcatccagcatatggggaccaacatgtgatggcctcgatcggattgttgagcgctgtgacctgcctgaaatgcatgtgggtgattggatgctctttgaaaacatgggcgcttacactgttgctgctgcctctacgttcaatggcttccagaggccgacgatctactatgtgatgtcagggcctgcgtggcaactcatgcagcaattccagaaccccgacttcccacccgaagtagaggaacaggatgccagcaccctgcctgtgtcttgtgcctgggagagtgggatgaaacgccacagagcagcctgtgcttcggctagtattaatgtgtagatagcactctggtagctgttaactgcaagtttagcttgaattaagggatttggggggaccatgtaacttaattactgctagttttgaaatgtctttgtaagagtagggtcgccatgatgcagccatatggaagactaggatatgggtcacacttatctgtgttcctatggaaactatttgaatatttgttttatatggatttttattcactcttcagacacgctactcaagagtgcccctcagctgctgaacaagcatttgtagcttgtacaatggcagaatgggccaaaagcttagtgttgtgacctgtttttaaaataaagtatcttgaaataattaggc

SEQ ID NO: 194 - DNA, 1105 bp, human
gggcgaggagggagcccgcggcggcggcagcagctacagcgaaatggcggagaccgtggctgacacccggcggctgatcaccaagccgcagaacctgaatgacgcctacggaccccccagcaacttcctcgagatcgatgtgagcaacccgcaaacggtgggggtcggccggggccgcttcaccacttacgaaatcagggtcaaggtcgtagttcccccgctccctgggaaagcgtttttgcgtcagcttccttttagaggagatgatggaatatttgatgacaattttattgaggaaagaaaacaagggctggagcagtttataaacaaggtcgctggtcatcctctggcacagaacgaacgttgtcttcacatgtttttacaagatgaaataatagataaaagctatactccatctaaaataagacatgcctgaaatttggcaagaaggggcaaaaacgtgactattaatgattgataagcaccagtgaagaagttctaacttttagcatgctgcacagaaactggtataacatgccttcagtatactaacactcatatgctcagttttgttttgttttggcagttgacaagaagttaatttgctttagtaaaaatccctcattccagcctttctatataaatagctctttcttgctgttttaatgtggtgcacactatagcctcacaaacctgttattccagtgtaatctgcagtgtcgtaactaaagttactggcttggtcttatttgcacagtttttgcgtcttgtttgcttcttgcatctgattaactagaatatttctctttcccccttttaatttgtgatgtcacttgaccccatttatgtgtaggagcactacaccattggtttccaatactgcacacataagatacatacttgtgtgcagaaagtatcttcctccaggcttgtaatacccttcacatggaagattaatgagggaaatctttatattctgtataaaaacaaaagcaaatttatatactaaaatcatttgtctaaaaatttaagttgttttcaaataaaaattaaaatgcatttctgatatgcaaaaaaaaaaaaaaaaaaaaaaaaaaaaaaaaaa

SEQ ID NO: 195 - DNA, 2133 bp, human
gaactggtggcagtgagagacttcggcggacatggctcccagcgtgccagcggcagaacccgagtatcctaaaggcatccgggccgtgctgctggggcctcccggggccggtaaagggacccaggcacccagattggctgaaaacttctgtgtctgccatttagctactggggacatgctgagggccatggtggcttctggctcagagctaggaaaaaagctgaaggcaactatggatgctgggaaactggtgagtgatgaaatggtagtggagctcattgagaagaatttggagacccccttgtgcaaaaatggttttcttctggatggcttccctcggactgtgaggcaggcagaaatgctcgatgacctcatggagaagaggaaagagaagcttgattctgtgattgaattcagcatcccagactctctgctgatccgaagaatcacaggaaggctgattcaccccaagagtggccgttcctaccacgaggagttcaaccctccaaaagagcccatgaaagatgacatcaccggggaacccttgatccgtcgatcagatgataatgaaaaggccttgaaaatccgcctgcaagcctaccacactcaaaccaccccactcatagagtactacaggaaacgggggatccactccgccatcgatgcatcccagacccccgatgtcgtgttcgcaagcatcctagcagccttctccaaagccacatcctagtatcagaaggccaggcgagactgcaacactgctcatcaccccgcggcgtgatccctgctcttaggtgctgggcagaggggaagggtggtcagggtgaggatggtgagggagggctggtgaggggctcagaggaatacttggaacaacagcagtgttattgtagtgtggcagtttcttttatacataggtgagagtttttaaagtgtaagggaaaaattaattttttaaaaaacaccatgcttggagggtgggggtagaaatagacacaatattatttctaaggaatcgggttttcatttactctggactggtgaaaatattttttaaagccagtgctctaagacctcagcttttatctcagaaccccatgggttccagaccaagagtacaggaaatcaaattgttgtcctgtctgtctatagcttggaacagggagctttgattactgactccggttccacacactgtaagatcaaaaaaccatctccacatttgaaagagatgtaaggtgtattcatagggatggtggctcaacaaatcaagcaaactggaatcaaggggagggggaagggaatgaaatggaaagggaggctgattcccttcccctgacttaccactaatttactaggctacctactttcatgagtaacctctcacagctacccagcacatgccacaatcctatcgtcttgccttcttttatctgcactgtgtgaagggactcttttaaataaatgagcaagtgtcctaagctatgtcatccaaagattgtcctttccattctcaaatcctgtgactgggatcactcaacagcactgtgatgtattattttcaatgaggtgcctttcttaactgaccaaatgctgccttgtttggcccctaaatcaataaaatatgttaaaatttgtatcccctgttgtggcattttttttagataatctaagctagaaaaatgacattgaattctggacctggctggaaggaaaagaagccctttcttgtcgctggcagctgtgtggtaggaggtccaagtatgtgcatatgagataagcctgcaacctcttgaccttcagctcctatgcaggcttctcttgagcccagagacaaggcagcttggtctagtggagatagcactgtgcttggagttcaggggacctaggacaaatcccagccagttagttattcactgtgctcctgtttcctcagctgaaaaaggaagttggttatgccaccttcttggccttaatggcattaaatgaaatttataggaagaaggtttttgctcagtacctggcatgcaacagacattggataaatgttagttggatccagatatacacagaaagatatctgcttcctgccaggctggataactgttgaatgacacttgtccatagtctaga

SEQ ID NO: 196 - DNA, 564 bp, human
  misc_feature (451)..(451): n is a, c, g, or t
  misc_feature (491)..(491): n is a, c, g, or t
  misc_feature (509)..(509): n is a, c, g, or t
  misc_feature (527)..(527): n is a, c, g, or t
  misc_feature (549)..(549): n is a, c, g, or t
  misc_feature (551)..(551): n is a, c, g, or t
  misc_feature (558)..(558): n is a, c, g, or t
  misc_feature (563)..(563): n is a, c, g, or t
gtttttttgaagtgactgactaaaaagagaacagataaatacaagagtgtcgctggatcctattttatacaaggattacgcctctcctgcttggcccttactgtcaccctgtacaggtacaaaggctacaaaaaaggaagcaatataaacagacacaaataactttttgcttttttacatgcgatttgtaagcttagtttgagctattcacaagctacttttctatttttccttaaaaaataactccaatattttataaagatagaaaaatctacagatggaatgaaaatgtaaagttagaggcatttccataaaatagcaactttacaccaaattcactatttttttttaaatcctgccaagtatttggacatatatgaaatgtttcaaaacctgacagataaacactgagatatgcctcattcaataataatatgacaggacacaagangctaaaaatggctcatcataattaattttatggttaaaanggccagctttttttggtnggttttgggtttttgaanggctggctaaaaggagacccgntnattcccnagggng

SEQ ID NO: 197 - DNA, 822 bp, human
  misc_feature (818)..(818): n is a, c, g, or t
  misc_feature (822)..(822): n is a, c, g, or t
cagcggaggtggcgctggctaatctcaagaacaaatatgaaaatgaaaaagcaatggtgactgaaaccatgacgaagcttagaaatgaactgaaggctttgaaagaagatgctgcaaccttctcatccctgagagcaatgtttgcaacaagatgtgatgaatatgtcacccagttggatgagatgcagagacagttagcagctgcagaggatgagaagaagactctgaacactttgttacgaatggctatccagcaaaaactcgccctgacccagaggctggagggcttagagtttgaccatgagcagtcccgacgcagcaaaggcaaacttggaaagagcaagatcggcagccctaaagtaagtggggaggcatcagtcaccgtgcccaccatagacacttacctcctgcatagtcagggcccacagacacccaacattcgggtcagcagtggcactcagaggaaaaggtatgcatgcagcgatcttcatagtacggtgcagtggccagattttagttaactgcaaaaataaatgtgctcttgttgtggaggatggaggaggggaagcaaaagaaaaaatgggagctggcatataaatggtcttgctaatgtggctctttccagatcaaaacctttttgataattgtgtttatgtagtcctttctaaccccctgcccaatccctcctcttgattaatcgtaatataattttcaagygtctgttaatatttttgctactctttgtatgtgtaaatatgcctctcccttacctccaacctgagaattggtagataaaggtggatattaagaatgdcktnvdsn
